United States Patent Application Publication US 2020/0354739 A1 - sequence listing, part 4

SEQ ID NO: 37 - DNA, 480769 bp, Glycine tomentella
atggaatggaaccaaaagaaagaatcccattatgtgtaggcagcatcttccaccaactacagtataaatcgactctaagtccctaataagaacaaaatcttaatctaattcacagtactgtccaattcaacatcaaatttcagtttatataaaaagaaattaatttcacatctatagaataaaaagaaaagaaaaagtaagaagatatgtgcatatcctttaatactatataataataacaataaaagttggtgagtgatatgcatgcatcattaaaaaactaattcgaaggatatatgaagaactacgccactttaatcagttttttttattaataggttctcaagttcaaaccggtggtataatattaaataaaggatatggagttagttttttatagaactagttagatagtcgatgatgaaaaaatcaaaagggctattatttcatgtagtaatgttgacgctcgcatgcattagggtttgggtggcgcaacgtgatagagacgtgcatgatgaccatgaaaatttagtaatataaacggtgattaggtcccttcgaaggaggaaacgaagaagagaatacaagttatatatttattatattaaattacgatttttttttcttttctagattgtgcctttgcctattcttcgccgtgcttcatggatccaccattgcatcatattatattgtacgttatgtatggtgtttatgtatttttggtttttgcttcaaactttcggatttatttgtttatttaataataggtgttagtgatttgtttattgggtgacagtagtagcattaccatatgatatcatagtatataatgtattgggggcatatatagaatagaaaacactgaagtctaagggatcatgattatggcttgggagcaagtctgaatggacccccataatgattaagagagggcagtttttaaatcgtgggttgggtgggcatttccacgattgcccgctgacccgatatgcgtgcatgctttaaggatttaggaatctcttggcttaattgcttaaagggaaattacttttctgaaacattaaaatgaaataggaaagtggagatggggatcaatcttatgcgtaaagtagaagttacaaaatcttatgcgttggtaagtaggcccaagacgtaagccactgacaaagcatgacttcatactgatttcatattcactatatttacaaaagaagaagaaaaaaatattagattagatatataaaaaaatagagaaaattaaataggtatagtattttttttttcaagttttttgtcttaatcaagattttctatgtgctagcattattgtatctacaatttatcatgttagattagtgattaatttgcaacaatttctgtagctgtgcatctaaattaagggtaagactaattaatgatatgaccaattagtggaagaaattaataatatcgtgaaattttaagagtcaaattaatgttgagtataattgtatctccttgcaaagtcagtaattaagaaaattacttttagagttgtgtttctcttatatttctttaacccatttgattataagatgaaaatattataaagattatcaatatgacatattgtgtgtatgtagcttcatattgtagagagtctttacttgaaagtgaactaaagcgagccgtcgcgtaaagacagatataaatattagaatgagagattatatacgagaaaagtaaacacaatgatgatttttagtatatcaaaataatgcacacaaaaaagttataaaaaaatatataactagaaaagatggaaaaacgcataaggaacattatgactatcatttcttataatcacgcacttgatgtaaagttatcatcatgatatgtatattgagtttaaccatttgctaaggtcatgtattgtaatttctattactatttcttttctgtttcgcatgatatatttcttttttcttgtgtggtggtggatatatcactgtatagccacgtgatgtgtatataatgtggaagatgataatgataatgagctaggttggaatgaatgaatgaataataataaatgtgcaatgaatggaaatactgttgcagataagataacatgcagagggcagcaacttttacctttcttgacgttgcagcatgtgagggataacatttggagtccgaggacaccaccccaagacctttgctttcagattccgcaaccaccacagatcatgtcatggtgctccattacggtagaaccacaaactgaaagtgaggacccgcaagtaacttcaaatgcatcttgttaattgtatccctaattgttaacttatgatctaaacccttttccctctctctttttttcttttcttcttactttcttttttctttttccattttctattctaatggttttgattattatttattttgatttttcttccccttttatatttcttttaactgacatggagattatggagaatcacatccccccaaaacagtgtttattcaattagggttttggggtggcagcattacccaaaattgtattcccatgttgggcggggtgggtgaggaattgccatcaactgtattaccaagcacaaaactcaatctaatttgatccactaacccattttccccttttagtctctatttattctcatttatattgtttattatgcttattaaaaaattatactatcgtttattctcaagctacaagtatatatatataccaacataatgagtagttgatatcaatttattttgtgcataattagtgtaagatgttaattattagttagatatgcatcatgtgtgtattactgattaaaatgtacatgatgcacatttcctttactatatttgtactaacaaatttgagcttactaattaaattaataatgcacttttatcagtttatgtaggaaatcagcgtatatcgcaattgttagtcttgtaaagcactgacacccgcgagaaccgtacataaaattagcaaataattcatgcatatgggtgcttttaatattaaaaatataaataaaaatggagaaaaattaatttgattaataaagcactatattttactaataaaatgttaattaaaagtatgtacatttataacctgtagttatccagaaattgttttaatttaatagaaaattatttttgcaaatatcaacattatatctaatgttaattgaatgaagtttagaattgattaaatgaattcatgaaagtaaatgtatttaattaaataattgttaagaaaaaatatttaatcaacatgcaagttcatagggcgtataccaaaaaataaataagacagttatataaaaagaaaatacgtatagaaatcatttcattctcaaaactaatgactcaaattatgaatacaaataaatttaaccattaacaagatagattaagaaaagtacatatttttttctttattttcgttaaataggaaaaaaaatcattaatgataaaaaggatcctaaacagagcatagtaaatgcagcagcataaattaggaccaatatattgaatgaataactagttaataaaaatcattttttaaagcttaaaagacacgtgaggaaggagagtatacattgacattatttcactttcaagatttaggactcaaatatatgatataggggcagattttttttacaagaaataagttttataagacatgagcctgaactgcttttcaaacataaggtttgagtcagagcggggcaaactttatcggaatcctatttaatatttctcttttttagaaaatgagacctttaattgacaatttaaaaataaatgactcatttaaataagaaaaatactttgttcaataaatattatcaaattacattccaaaatcagttaaaacatcctaagggttctaacaagtcatttgaatagaattgctctcttcgcatgtgttaaagaaaaatcatctataacattttcaacatcaacttcttccaaaaaatcgctttcaatagtcattaaagcaagtccatttagtctctcttgtaacatagttgtttgtagatacgacttcaacaatttgagttttgaaaaacttctccctgcagaagcaacagtaataggatagtcaataaaattctataagcaattgttgcatttggaaaacaagtaaaacgctttataaattgtaatatttcaattgctcccaatttttctttaggtaaaagtgcgattttgctgaaagaaattgttggaaatatttttaatataaaacataaattttttattcaaacactatttttacagctccccttggaccccttggttattaaaataggcattaccatctcttctaatttttagtattaaacatatgttgcaataattaatatttgaggtccgttattttttgggaccctatgtagttgagcaccttgaataggtccagaaccggccctgatttgagtttaacttatttatctaatataggtcattttatttacctcatttgatgtcttaaaaaatctagcctaatcctttaaatagttataagtaggctaacagatttaaacttgtatggaatatggactgcattaaatatttaagatgagagttttattattcataataatcatatttggtccaaataagattatttttcataacagatatacgtattttattcccaaaaaaaaacttgtacacaagtcaacaagctttaacctttaaaacaactaactaatatataatttcaaaatttaatgataaaagtctaatacaacaacaataacattaatattaatataggttatattattattcatttaaattggacaatgtattatatataaaatgtttttgaaactaaataaataaaagagtggatgtttgtgtgcagattaatagcctataactaaaacctaacataatatttgtttttctggtcgagaaaacgtctcaacatctttttttgttgttgagctcatcccaatttctttaacaattctgtatgaagattacggactggaccagtttgttatggtttaagaggcccattatatggacaactcttggatggaagtcttcaaaagttatcccaagtaccaaaaaaaccgttgccttaatctatggatcagactcttattttttgtcatttactcgatcattgttttagccttttaggtctttcataggcgagtaagtttatgtataactattgactaatgtttcaaccattttaaatgttcaagcatgaagctataacacatgtcatatttccctaacactttgagttaaatacgaaatgttaaattctataagattataaataaattgaactagtttacaaattatttaaactttttcaatagagcctattctcgtattacctttttatatatgataatcacaaaatttgaatataaaactttatgtaaacttctcaattctctgactactagattaattctaataatattatgaaaaagtctacttcaattagttaaacagtatgtgaattgttgtaaatttcttatatccgagtttcaatttctaggaaccaaaaaatttctaaaaggtttgattctcatgttacctaatggacaaagcgtttttattttaaatcacacgtcatgaaagttatgttggaaaaaaaaaacaaactatgcatgaaaattgagattgaaattgatcgcagcatgaaggatgttgttacccataataagaggcccttggatttcaaacaaacaaatttggaacagaggtatgaaatgatgcacaagaataataatatgagctacattacactgtgaatatgctgctattctgttagttttgcttactcctgaagaggcaagagctgcatgccactgaccaaagagaaaaaggtgcactgaaaaattgtacgtgaagggggagtggctgctgtcccaagaatatacagctccgttacactatactagaatcatatctgaaaactgtttcgttctcctttcttgctgtattttttctatgttggtttagctactgattcctaaatttgaattgggactccaactatgcatattccttaaaaattcaatttcttcactgtgattccaaaattacctaaagcctaaataaagatgctttctcaatctttctttagacattttaattttgatgtattatacactcttttaaaaatttagatatggaatgtatatattatacattttttttcttctgaaaatttaattacaaaatatttaagaatgatttatgaaacatttccaaattaaactttcaataaatatttaatacatttcaaaactaaaattgtgaaagtattttcaatatgttgctgaaggaacattttgaatattctagaaaaagtgttctgagaatttaaatgttttactatatgtaaggatatttttaatttttttttctgttatctgaaataaaatttaaaagaaactaaagactgtgaaactagtaagaagaaatttttttaatctacataaaaatactaagaaatgtataacaactcactcactttattaaatcatttgacccttggttaataaggagagattatgttaaaagtaatgtccagccacttaagaggagatataaaattagcttggtgatcaaagaaagaagtcgtaagttcaaatttctcccactaacattctaaaaaaattaaccattaacatttgaggataaaataaaaatttaaccacttaatagtcaacatcaaaagtccaacactccaacctctgctcaactctctactctacagctgtagagttcgtttagcaaaagtccaacttttgcaatctttggacctggacctctcttccatactcacaaatagaaggctctaattatcacacgattttattaaaaaggaaaaaagaaacaacgtaattcctttccaaaagattctggtcctcacaatactatcatctcttttacttttctaaatgattataagaggggtgataataaacatttcttatttggtggagtaccagataagaggggtgatagtaagattttattctgtttaatatatttacattctcgcaagagtggttcagacttaaaaggatattagagacggggtaaggcgtacgcaactgaaattccagtcatcattacgtggaaactagggaacctctgataacaaacagaatagattcttaacttgtttgaaaggaggaggagcattttatttaaatcagcccgacagaatacggatttcagaggtggagaaatgtttattataagagcatatagtgagaagataaaatactaattttgattcaaaaagtaagcatgcaaccatgattagcttcacaagcacattggccagtttgaggttaaaagtagttaataaaataaaaaaagttttatcccaatagctggatcacaataattcgattcgataaagtttgttgtagttagaattggatcaatttcagatatgctgacaagtgttcctgtttaaacattcttttcttataaaccaactcataagaaagtcagtttaagcagcagctatttatttatttgtctaatgatcttaatttatgtgctaaataatttataatcaaaattataacaaggcaaataataataataactttttcttaaaaaatcatcaaaaccaaacatgagctagatatactacgttttcataaaaacttctcaactcataatgatatttggaaatcattatacgtcttcataaaaacttctcaaatcatatatttcaattcagttaatgttgcatgacagtaggtgaatcaagaaggcatcaaattcgaatgaaaataagaaaccaaacctcattttatttgaatttcattaacaggtcaaccacatgcacgacaaacaaaacaagtctccgactctgtccaaatctaatctatggtatgcaagaagacggatcaaatctaatcactaaccattagtcgggcttatctcactcacttttcagttttcactgccaaaatctgattgaagtcagctgaggtggcactgcactaaattactgtttttgaattcaccacatgaaatcttactattgatacttgcagctcaggcaagctgtggcagtcagttgatctatatttctactcattgtatcatttcaaatacaaactaactcaatgtcaactcacatggcagaatgtagttacaataatgatcaagtagtagaaagattaatcatttttttttgtcttaaccttccgattcatcaggaaaaaaaagattctaattaatctaaagttcaatccggagacaaataaaatctgaccaagaattatttcccatcaaggattaaattcaagtaatacccgaataatttaactttaacttcaacacattaactacttgtgtccaatcacttgtacctaaagattaatcataagtcctaacatatagacaatataccattcagcaaatcctttttacataagaatacaaaattacaaattagtatacaatgagaagaaaagatgcctccgcaaccaccataaatgttatgattatttattgatcactttgcaaaatataaagataaacacaattatttaaggaaatcttatcagtatcaactgcaagcacaatatcacatctgattcgcatgatgcgttcattatttcagaaaggaaaaaaaaaaagattacccctattgcagtatgaaagttagaatacagacagagtagctcaaaggttaaccggaaaacagaaacaaaattctatccagccctcaaagtctctctaaaagacaaggaaggtaagaaacaagtgtaaactctccctagtccttggcaggttttaatggatgaatactgaagttatagtggagggatcattctcatcaactataggacaaattaattacactacatatttctcaagtcatgataaaatttcattttacaagaccacatcaatctcagcttaacaagaaacattaaatcgtacattacttcaaaacatattcagactaatagataaaagagcaaaaacttctaatttcgacactaaattctcattgactatgagtactgcattgattaagtgatcatgcatcgtattcatcattctcccatgttaaagaagcactttagatcaggtaaccggctacttcaattaggcgacaaaatcacacggagaaaaagggaaagaaaacatgccatcaagaaatttcaaccagaaagcaagaataacagtcactaatccccctattgttcatttaccatagataaagtgacataaaccaaaaactcttgtacataaatgcgtttttctatccacatttcaaagccagaacaaagaaaaactacacatacatatacatatacataatacatacatacattcatcttgatccgattacaacacggtcatgtcacggcaagcatttcctcagcttctggattgcagtgtacattttccttcttgaaccaacagcattgatccccatgtccttgagatcctccaaagtcaacatcggaagcaactcgtcatcgacctcatggatctcaaacataggcgcatacctactcagccctaactcgtaaagccaagacctcactccatcgctcttcctccgttcccacgactccgattcaacgccgtcgttttccgaaaccctaaccctaggatcctcgttccgatccacgtgccaataatccactccgttgtcctccaccgaatgcactggactctgttcgtgttcgtgttcgaaatccctaaaaccttcttcgtcaccgttttcgtcgattgtcgctctaggagcccaatttgttctcaatcgcttcgtcgctggtcctcgttttgcttttcctcttcggctgttgctgtttccgaaatcttcgccgccgttcgcgaggttcgtcacggagcgcgccttcgaggttctggaagattccttcggagtccgccagctccatggcggcatgctcgggcggcgcgtgtgcgagtcatggaagtgtgcggaggcgcgttggtcgccgatctcccccaggcgaacacttggacggcgctgccgcttccgagctagcgccagaggagcggcgatctcggcgcttggttgcgacgttgttgccggagccggagctgcagtttcctccgcgacgtccggtgcggaggggattggaggttccggcggcggtggattggtttcgggctcttccgccattgtgcttacagtagttgtggtgatgtgcgcgggataagggagatggagagttttctggtgcggtagggtgcaacggtgcaatcaccttctaaggtttttgcgccgttggatggttatgatgcgggttgttgaaataggtagatggagcctagctagtagattcaggacttcaggacaagtggctcgtttgaatatttgaatggatcgcgcatgccatgtgtaaaagaactgcattggatatccccaaattaactaactttagttaactttactacttaatcatacgtcttaggatgatttctccaagggttgggttagtctttcaattatcttttaaaaaatggagtataattatcattattatttgagtgcctctctaactttttatgtaaataaaaatacaaatataagagagatatctgacaaacttttaatttaatatttcttagctttattatcacgtaataattattgcatttatttacattttcaagcttaaattacaataattatcttatctttctcttatttattgcaatttttctcttttttagatagaattgcttgtgatttagaattacttactcataaaaccatttggcacaaggattcgttaagcaatacatgtcaatcattagtgaataacctctaaagttaacaagtcataaacattatttttgctcagtgataagttatggtcattgagcggaatacttttggaaggctacttgaagaataattaattttcattgagcgaattatacatatctctatatgaattgtgtttatggaagaaacatcaaacataaattatgagaaaaatttgaggtggcaatcattggaaaacattcatataataatcgagagactagttttcaatttgtagttgctatgcctccatcttcatccaagctccatttttctttaaattttgtaattctttcaatttgtagttgcctctcatattaacgagagactagttttcatctttttaaaggatttagtgtattaagtaaattttatgtaatcattttactatctattcaatatttgggttaaatatcaatgtttattctttgtattcaatatttgtttttgatcagtcatccaatcacattattcttatagtttaattgacacaaaaatacttttaaaactaagaaatgaaaatgatgtccaatgaatgttataaataatacttattagtctctttagaacctttgaccatgtaatcaacttatttaacttacacaactttttgaaaatgggattttatctatgataataactcgtatctgtaatttttgaatgaattttacccatactaggtatagttttttttttttataactttacttatataaaaaataatagatataagtctttgagttattccctgcattaaacatatgtaggtaaaagtactttttagattacctatattaacttctatgcataagaaaatatttcataaaaagtatcatcttatgataattttaatcaataatatcttaaaattatcaataaagatacttcttattaatggaagattcactttcaatcactttaaaaatacaaaagggcaattttttaaagacaaagaaccaagttaaaaaaaaaaatataatttagcctatctttatcttatttatcatgttttaactatcctattaactccacatttattttttaactatcctatctcattcccaagaagatgatttctttagaaataaaagatttttttagataaaatattattgaaaataaacgggaatatctttatcaatattatataacatttgaaactcaattttatttataaatcttattagttaatcataaaatcttgaactcatttcagttattcaacacatttatcgtaaaaatcattgcataattatttaataattaatttgaaggtgtttaaagaaatctacatctataattgttaaaaaaaatcaaatattaacaactatgagaattatcggtttatgctttgaaaaaaaaaaaaaaggattatcgttttaaaaaatagataaaatcggaaacacagtaaaagtctgcatggtacttgggtcattctcgttcgtaagcgctaagcaccacacggggtttctttcggggatcactgacgtgtacggtctagattcaaaatcccatagattctccttcgcatcgtatccctataaaatcgcctctccctttctcctgttcccattcttccgtgaccctcgcttatcatttgttcgtttttattttttttataatcaaaattttcactattatcgttactgttgtcatttttgttctctctttcgaaaaattcgatggcttaatcgctcgtcgaatttgaagaaaaccttctgcgattcgcgatctcacggaacagatccgacgcggtgaaacttccgattttagtttttaacactgttgttgcgccctaattctgagattttcgaaggaacgaaattggaaccctaatttaatcacttcgccataaaacttttcccgctattttaggtcccgattcgattctcggttggttttgtttgttggttggttgggtctgctttctatggttttcggatcgttattggattttgagaaattgggaaatttggagaagatggggaaggaggtagaggatgctgaagagggtgagatttcggatactgcttcggtagaagagatttcagaagaggatttcaataagcaagatgttaagttgttaaataataacaataagcccaatggaagtgatgctagggtttgggctgttcatgatctttactcaaagtaccctactatatgtcgcggctatgcgtcgggtttgtataaccttgcttgggcacaggccgtgcagaacaagcctttgaatgatatttttgtgatggaagtggactccgatgccaatgctaacagtaacagcaacaactccaatcgactggcttctgttgctgtgaatcctaaggatgtggtggtggtggatgtggacaaagaggaaggagagttagaggagggtgagattgatgccgatgcggaacctgaaggagaagcagatagtgttgtggctgtttctgattctgagaagcttgatgatgtgaagagggatgtttctaattctgagcagcttggtgtgaggggtgttctagagggtgttaccgttgctaatgtggcagagtaagtggaactgttgttaatggattttgtgttccttttctctgaattgttggcattggagtcacattacaatgtttgtaacattaaattgattttttgtttgttgttgtagatcgttttctcaaacttgcagtaagctgcaaaatgctcttcctgaagtgctcactagacctgctgattctgagagggatgatctcgttcgcatgtcatttaacgctactgaagtggtttattctgtaaagacccttgactgcttttgctgatatcatttttttgtttctactgggatttttgtcatgattgttttatgatttatcgtaggtgttttgctctatggactctttaaaaaaggaacactacaaggataacatattaaggtttttcaaaatctaaagtttttaggtggtagcagtaaattatttcagtttgcaatgccatctatcactaactatgtttccttcactacacacttttcatgtcagattactttcttctgtgaaggatcaacaacaggctcaattattttctccagagcatataaaagaggtgatgtttaatgttgactgaattttggaagtcgttttactattatcctcataatcttcaatttagaaattcaaagatgggatagaatatgaaatgtggttgattcttactacagattcagggcatgatgactgcaattgattctgttggtgctttagtaaatagtgaggctattggcaaggagaaagaattgcagaccattgtacagacgcatgagataaagactcaggaaaatcaagatgtagaagctgctgaattgatttctaatagtaagcctttgcatagtgacataattggggcatcacatgctttaaaatttggacaaaatagtattaaaggtagaggggttctgctcccgctgttagaccttcacaaggatcatgatgctgacagtttaccatcaccaaccagagaagcacctttgtgcttccctgtgaataaattactttctgttggagagcctatggttagatctgggtcagcagctgctaagctggagtcaggaaagatggaacttgatagtgaaggttctaaatttcatctctatgaaactgatgctttaaaagctgtttccacatatcaacagaagtttggtcgaagttccctttttacaaatgataaatttccaagtccaacgccttcaggtgactgtgaggatgagattgttgatacaaacgaggaggtctctagtgcttctactggtgattttttaacaagcactaagtcaactcttttggatcagccacctgtttctgctacttccatggataggtccagcttgcatggattcattagttctagagttgatgcagcaggtcctgggtctttgccagtgaaaagctctgcaaagaatagagatcctaggcttcgtttcattaattctgatgcaagtgctgtggataatcaatctacattgatacataatatgcctaaagtggaatatgctggaacaacaatctcaaggaaacaaaaggctgctgaagaaccttctttgaatgttactgtatcaaaaagactaaaaagttcattggaaaatactgagcataatatgagcgaagtaagaactggaagtggtggttggttggaagagaatgctgggcctggagctcagttgatagagaggaatcatttaatggaaaaatttggacctgaacccaaaaacactttgaatacagtcagtagttcctgtactggttctgataattgcaatgcaacaagcattagaaatgagcaggcaccaattacagctagtgatgtgctagcttccttacctgctctattgaaaggtgcagctgtaaatccaaccatgttggttaacttacttagaatagcagaagcccagaagaaatctactgattctgctacaaatatgctgctgcatccaacaagctcaaatttggctatgggaacagattcaactgcaagtattggttcatcaatggccactggtcttcaaagttctgctggagtgcttccagtttcatcacaatccacgtccacggtaaaatgctgtttgtcttaagtatacactactgaagtcaatttttgaatattcacttgtggctatggtcttaatatccaattatctgtttctttcttctaaaaattgaattgaaaattttaacatcatgatccttcattatgaatgaacttagttgtggaatttgaaagtcacaatttagtgttatgaaaatccgtcaagctaactgtagtttacatttttgcatgtggttggcacaatcagacacaaaccctacaagatgattcaggaaggattcgcatgaaaccccgtgatccacggcgcattctccacactaataatactatccaaaagagtgggaacttggggaatgagcaattcaaagccgttgtatcccccgtgtctaacaaccagggaacttgggacattgtcaatgcccagaagcttgagggtagggtggatagtaatttagtgcctattcaatcaagtgcacaacctgatattgctcgacaattcgcccggaatctgaaaaacattgctgatattatgtctgtttcccaagaatcatcaactcccactcctgttgctcaaattttttcttcagcatctgttccccttacttcagatagaggggaacagaaatctgttgtgtcaaactctcagaacctgcaggctggcatggtatcagctaatgaaacagctgcatcaggtccctgtcgatcccagagtacatgggagatgttgagcatctttttgaaggttatgatgagcagcagaaggctgctatacagagagaaagagcaaggaggattgaagaacagaataaaatgttttctgctcgaaaattatgccttgtattggatctagatcacacactacttaattctgctaaggtaatttgcatggaatgggttctcctttggttgaaaatttgtgttattgcaagttaacaatttctctttcagtttgtggaagttgatcctgtgcatgatgagatattgagaaagaaagaagagcaggaccgtgagaaaccacacagacatctttttcgctttcctcatatgggaatgtggactaaactcagaccaggaatctggaacttcttggagaaggtaataatatggattcttttatatgctttaggcatgacattgtgcaatggcttaattttgaaataaagaattcatatctttcccaaatgctttataggctagtaagctctatgagctgcatctgtacactatgggaaacaagctatatgcaacagaaatggcaaaggtgcttgatccaaagggagttttgtttgctggaagagttatctctagaggtgatgatactgattcagttgatggtgaggagagggctcccaaaagcaaagatttggaaggcgttttgggtatggaatcatccgttgtaattatagatgattctgtgagggtctggcctcataacaaactgaacctgatagtggtggaaaggttcgtgtaacatggggtttcaaactcatgcaattctttcctggttttatatatctagcagatgaatcattcctatattaaattttaagacattgcaggtatacatacttcccttgtagtagacgtcagtttggactgcctggcccttcccttctcgagattgatcatgatgagagacctgaagctggaactctggcatcctctttggcagtgagtatatattatttttttctctttaatttggtatgacctgttcagctgataatttcttctcttcctctttaggttatcgagaaaatacatcaaatcttttttgcttctcgatccttagaagaagtggatgtcagaaatatactagcatcagagcagagaaaaatcttagctggttgtcgcatagtatttagtagggtatttcctgttggtgaagcaaatcctcaccttcacccattatggcagacagctgaacagtttggtgctttttgcaccaaccagattgatgaacaggttactcacgttgttgcaaattccccagggactgataaggtgtggttttattcccaaactatcagcatgttatgttagtctgtctgtctgtcatgttaaaaaatatagattcctgcattgctacagatctttataatattagagtaatttgatgggataaaaagggtaaactatgtgatgaaatttagtgtaaatcaaactattcatgatttttagtttggtttatgtttggataaacttctctagaaatacttctaggaaaagaaaatatgaagaacaaatgaaatgagtttctccatgagtcaaaattagttcatgtatatgctaatttgtagaagctctctcacaacttctctaaaaaatgatttttaacttatgcacaagctaattttaacttatggagatactcatttttctctctctcattttcttttagaagtgcttttagataagcttatctagaaacctggatatccagatgattaatccagctgtgctcccctttgctcataacatggcaacttaaactctttgtccatggcatatttatggacatcatttaataaaagaccgttttacttttatcaattagaagggagcccttattctctgttttttctccaacttctcttttgttaattcccacaacgaacaacttgctgtaaaatcttcactactatggtgtttgtggcagactgtgttcttgtgaattgaatttgaagcctaataaatgctacttgttctttcctttttcttgagcaggtgaattgggctctaaacaacggaagatttgttgtccatcctggctggtgagtatctcataatttacatttttgtttgtccttctgtgtcttttttcttcttggatttgacttgtgctgcttctttccccctcccttataaaacagggtggaagcatcagcattgctttataggagggcgaatgagcaagattttgccattaaaccataaaaaagaaactgacctaattctctttcgtaaactaaaatatgtgaaaacataaatcaagaatcacattgattttggggtgtgattggggagtgtgtgtaattttaccatgatgactgacctgttgttggagttaaatggaggacagtgagtgcccttgtaattctggggacacaagggttaggtagggcagggcagggcagggcttgacagaattggttgactgctttaggggctaggtgagtgatattgtaggggtgtcttttgtgagtaatagctctcggtaaatttttcatgagatggtattgggagtgaaatttatttctgttgctgacaaaggaaagttaaagacctctcagcattaagagaagagttaaaatgtgtggaggaactacctgaaggaggtattgactgaaacctaattcggggggaaaacaattcatttgttagaatagaacttgagtctaaggagaagcgggtgctagaacagtcgagtcagtttggaaatggattcatggccccagcaaaatgaatttctgataactgagtttgtatatcaatgcgtcactgtcaaagcatttgaggggcttaaattaatcaccattcaccctactcccttccccaaaacaataaagcttggcagggagggggagcagatagaaaatgaaaggaagtatgtctaaccatgatttatagtccaaacctcttggttgcttttaccgtcaattcatgaggattgcgttgctttacaattacaacaacccaattggaaaatcttgagaatttgtaaaaaggcaaactaattcatgatatcatttttggatataaagcttttataaccaaaatagaaaaaaagaagaaaaaaaggatgcgttctattatatacccaagaataatggtaatgagattcttgtgcactactggaaaaggaccacacaaattataccatcgagttatagttcaattttggtaacattaatgtacacttgattgctgtctaggactcgtagctggcatgtgtcatgtgtcatgctcttgcagtgattagaatcctattggtcgacgttttttttataaagaaaaactgtcattatttcccaataaattaagtatctctatcaacttcattttaatgatcaaaaggtgtatttttattctgcagggctgtttttacatcattattttttttttaaaaaaaaactgtataagattatggatttgtctttgtaagtttttttagaaacattgttaaaagaagaaaaaatagatgaatttttttataagtaaaattaaattttcacttagttaatttttagaaatatactaatatagtttttctaaaagatgagatgacatctataaaggaattaatgaaacattcattttagtttataaaaaaatttattttattttattttttgtttctagaattgtttatagagaaatttatgttcaaataagcctttcagtatttgaagacgtggaagattttttatgcaataaacgtatttctgggtcttgcatagaaagtgccaaacattacattatgcaaactcattacaatataacctcagggttatcatttgaaaatacaaaacaattggtccagtttgttttttaacaatttttccacccagactcctttattttctgaaaatttcaagctactaaatcacatcaaatgaaaacaagttattagatttgtaatttgcattgtttaaagaagactattgaatcaaagctaaatgtttatataaaagaaatataaaatattaaactaatgtttatgtggtagtaaggggtagatgggttctttctgtagaagttaatgtccgtttggattggactaaaatggatggatgatgggtgagacaaaagtatgtggtaggagtgtattagagaatataagcattcctataagttaatttgctttgcaatggcctatatttaaatgggttagatttgactgagactcgttaaatagtaggtctctttttgttgtatggtttgtatttggtacacttaggctgcaggttgaaaggttggtttttgtattgaataataaaatgtaaaatctaaaaaaatgaaatattgaaaaagttgaaaaattataaacattgatacaaactgaaagatatctaagactaatgaaaaacataacaaataaaacataaaatattaaataataattcatattttaaaaataccaaacaataaaaacttaaacaaacaagtaatttatatttttaagaagtaattgatctgtgcaggtttgttcgattacttgcagatctcaacctgtataacccatgaattaaatggatcaatgtatgtgttgggactaaaatttcatgtagttctcgttacattttgaaaaatccatttaaaagtataataagaagtgcaggaagtaagaaagtaatactgcgatgcaagaaactacacccatgacttatagtccatcgttgtgactgtgtattgagttgggtaagaaagataacactcatcaaattcaatttcaatggttgtcttgtttaagagtaatatatatttttaatgaattttcttaatattatacatgttacttaaaatatgtatttacaagtgaaaaagagaaattaatttctaacaattttaaataacttgttttgacagaaaagattcagggcatttcccattgacatatgtgttgaatacaaaggaaaatacaatgaaattacatctcaatggacatttttgctaaaaatgagccacttaatttatttgcatttctactagcaaattaaactgaaccataaattttcatttgtgtgatatggctaagaatgacaccacatttagtaatgctggtccctccatcccttaaatttcgactatagtcttccaaactgtctcaaaaatttctgcattatagggtaattgctctacacacttcatagcttgtaacaaagcataagcctccccctctttgacctccaacactgtggataatcactttgtatggtcttgaacgaaatttccaaattcatctaacaagcagcacccaaaaccagctttattactgtcattgaaaaaggccgcaacatggtggacgctctaacaacaattttaaacaacttaaataattttaaaaaatgcttagcgagtcaggacatgaaattaatattgttgactacaaagcaattacaccctctttctagatatgacacagcatagttattggcatccattagactattaccattaaaattcgtacagtaacgaaaagaaaaataaataccatgtttaaattgtacataatgataacaattagcaaattgtacgaaatgtctaaatttgcatgcagcatcgttataaaacgtacaagaaaaagcttataaaataaataaataaaacgtacaagaaaatgaaggaaagaagatcgtgaaagagacgtgttcaactgttcaagtatattgataatgtgggaaatgggttcacgaaaaagaatcacagatgtgagtgatcaatatttatgtgaaaataagaacagtggtttgtaacattattgtgaactatggttataggccaattttatttataatgttaaaattttaaatcacgaatctagagagtcgctggattcggtagggttttacctaagcactacgtgattcaaaaatagtcttgtagctcatgtaccttgtaagacaccgggacaagatgcatggtagcataatgaagtttctccaatgaaatatgccccaaacaagaaccgagaacagatgtagaacatgggatgagactgttaaggccgttgaattggtgggggataattaatatcaattgttattgaaaaattattagataatttcgaactaccaaatgtcttatgattctgtctaatttatgcaacatgatttaagtttttaattttattaaagagaattaataatgcttttatgtcatatagaattagttatgatcataatggtactaaaccattttataatttctgatactacatctgtgcttactgctgataaaaaaaaacatcatatctgcttactgttaatattgcttccaaatgacagtagatgatcaactattttagcaggatataattattacgagtaataattttttttaaatataattgcatgtttaagacgaattcgaaagactactagtttagttaagatcgtctgtgttttttttatccatgtgctcggtgatgtggatggtcaaatgttaatgcgtgtataatttgttgtttcgatactcaattttttctttagtccaaatttaagttttaattggatccttatcatcactagttagtttattcattaataaagtgttgaaaagacaatagctagctgatttgtcaaaccattttgcttctataatctatgctatgcctattcaatggcaataggcccaaaaggaggatagaaagatagaatgtatgtatgtggatgaagtgcatgcagatgcagcatttgaattaatgtatatttatatggtggcctctgtcacagatcagtgagaccatacccttcttgttgtgacaaaggaaaaagccttcgtttcctttggtagagtagaaagctgcacactgtgaaagaagagaaagagaaacacgccatgcccattcattctaaaggtgattttgacctcattctcttccttccctgtcttatccaacacaaacacttttatttttttatcggtcacatggtcctatatagagcctgtgctttaataatgtatttcaatactaatatttaatactatatattaaattgtttataaaaatgtgtttagtatcgtacgtcctattattccttttagacatgattattaaccacggataatcatcatcatttcagaagcaaggattgcgaaaggccaagatgatttcctcaaagtggatgcatgtatatggttccatctttgtgctccaccataattattgcactgaaatgatgataagcgattatggtcgagcagtgttaatcagtgacatattttacagttaagttaatcattttcaacccattttttctttctaatcaaacacgttataagaagtcataaacatgtaagtatatataatttattacataattaagtaaaacttatattttttataatttctaataacttttagtcaataatagaacaatatttcaagaaatgtgataaaagctcatctcatatttggccttttgctctaaaatattggtcttgctgtgagaaagttcttctagaagttggtttaaatgggccaacagcagaaaggtaaaaagaacaatcgggcattgaggttgaagaactttgaggagggaaataaataggtaaaaatgcttttcagagccatggaaacatgaccttatgatttcataaatggtagatttagcagtggttggttaaaaagaaagaaagaagacaagattgtcttgacaaacaagtagggagaagctttaacccaacacggtcaagtgataatcataaccaacagtgacctccatattctattctgtactacatgatcacctgcatgcctccgagagaaagcaagaagttgcaatttccaatcttccttttttcctcctttttttattttttcggttatcatgtttgtaccttttacaaaacttctgatcttatttactcccgccgtgagtgccacagttttaattactttgggaagcatataataagttataataaattagatgtaataatattttattatagaagaacatatatactacccatggaacatgctgagtattttagctttttgaaattatgaatttgttttggatatgggttcatcttgtattgtaccattggattactcttctctcccctttatcctatcatcttccttcttcttagtattgctactaaattaaataatttaaaagaaaaaaatgggaccatgcgattgaggtgctggtgttgcttcaggctgtggtgtgaaggtgatgttttttttggataatcattttattggtatgaaatatttatcaattttattgataattaatctctgttggagaatttaattatctttaatgagattctctttttctaattatgtttttttcattgataagatttgaatctgagactttacttaagaaaaataagttcaattaaattaattacttattggtatgaagaagataatttaggttaattagtgaaatcactttatccaaagaagggaaaggattgtgttgtttgctagtgacacaagggtcgaccatccatgattcatatgtagcaatcatgaagtgatttatatgaaaatgagtaattttattattagagttgaataattttgtacatcaccaaatatagtaataaggagtcacttttcaaataatagaacaaaattttatggttgagaatgaaccaaaacaattacaaatagaaataggcagagttagctctctacaattaataatttgtattagaggtaataagacattttaatagtggttcaaacacaagaatttccaaatttaaatttggacaaattaaaaaacttgtggctaaagctccacctatagaattagttcccagtacagattgttgcaggcgaaggaacgtggtatccctgaccctcatcacgtctcttcttcttcttcctatacaacacatgcatggaaatcaagggtgtttgtgacagaaatggaaacggatttacctgtgtctaaattttttaattggattaaattttagaaaatgtttgatagacactaaataaataataattttatggagaaagaaaaaaatataaatataataaaatttatgatatagtaaaaaaaatattttttaaaaaataaataataatttatgtatcattactcctaaatttttaacttaaatttgactcaattaagatatgatgataacatattagataagattgaatgaatctaatttattgacataatatattaacttgtaatattatgtatagttaaatcgtataattaacgtatatagttataattaatgtataatttctcttcttaattacaaagtacattaaataaataaatatataggacacaggcgagattcttgagaacatcgaagattcgaaactgcgaaagtgtgaattgcagccatttcaatactaaaggagctttattcttggtttcaccttccttcacatttcccaaccacatgatccatttcttaattgcttttagagtttaattatttaaatctttaaaattttgattttacatttggcattatcttaattacttaattaatatgtaataattagagttaaaaattatttttcttgttcttttgctttctcttttaatagtctgtccataaaagacttgcgtaagatttattcctgcgttgtctgttattcagttaactagatatataatgatttacaacacgggtcgctccgccacgttccatcgtatttttataaattaattttcattttttctattgtaactaaaaagatatttatttatgttattgttgataaaataatttaatttaattaactttagttcaataaagaattaaattattattttctaataaatgtaataaataaattttttatgttaattattgtaataattgaattaaataaaaatagtataaaaatttcaaatcttcattaaatttaaataataaaactataatttttaaatttttttaaaatgttaccgttttattttactgatattttcgattattttatatgataaaagtttaaaaacaaatactacatttaatataaaaaaattctggattgtttgatatataaatgtgttaaatattattttttaaaaattttccgtaatgatttattcatgatggcatcatccaataattatttcttataaatgataattataatttctatcctaaaaaatgaaattaaaacaaattaatattatgatataatgagtaagtaattaaaatttttttgaaacaaaaattatttttataatttaattttaattttaatttttatctctttcgtatatttaaaaaaattatttatgatattattgataaaataatttaaatttattaactttgattgtcttataacaaagaatcaaattattattttcaaataaatatatgaactaaatgttattatgctgataatcgtaacaatttaattaaataaaagagtttaaaattttcaaatgttatatgatggaaatttaaaaataaataatatatttaataaaataaatattattgattgtttgatgcgcaactatgttaaatattttttaaattttttttcccataattgttcactcatgatgacctagtaaaaaaaaaattaaacagccaaattaaaaaaagtttttgtttccttaaaaagtttaaaattttcaaatcttaattaaatttaaataataaaatattatttttaaatttttttaaaatctcaccattttatttgactgctatttgccaattattttatatgattaaaatttaaaccaaatactacatttaattaaaaaaattgatgattgtttaatatgtagctatattaaatattttttttaatttcccgttatggtttattcatgatgatatcatctaataattatttcccgtaaatgataattataatttttatcataaaaatgaaattaaaactaattaagattacaatataatgagtaagaaatttttataatttaattttaatttttatctatttcctatatttaatatatttttattgatgatattgttgataaattaatttaaaataattaattttgattgtcttataacaaagaatcaaattattattttctaataaatatattaactaaatactattatactggtaatcgttttaattaagtaaaaagagattcaaaatttcaaatctatatgatgaaaatttaaaaacaaataatgtatttattaaaataaatattattgattgtttaatatatataactatgttaaatatttttttaaaaaaacttttttttccataacggttcactcaagatgacctagagaataattatttttcgtaaattataattgtaatttttatcactcaagttgttactttgatattttcacccattcaccaatgatgtctccaattttaaaatgtttaatgaaataaaaaaataagtattaactagagattcctatttcattaacaaaaactttatatatatatgcttgaagacgtttaaaataaaattatacatttatttaattcttaccaataaagtaatatatctattgatgacaatgaatttatctcttattatagtttattgtagcttaattatttgacaattgtgatatttttctatataaaaataataagtaaaagtaaataatattgtgtgcgtgtattatgtatatgaaaattgtctaatgatgttaaaggattttgttcttataattttttctatatttaggtttactcatgaaagctttattagtagtaaattattttactcatgtcctttattgaatataatttttatctcctcttattatgtttatgggtttaatattcccatgctaatacatggtttaacaaataattattaaggtagatataaattaaaaaatcataattgaatttatgctcttatcaatgaatgtaaatacatggtttaacaaactttctcatacattacggcagatatccacaatatcaataaacagcttcacaatgaatcttatattcaaaaagatgttttttttaagaacataataaattaataactcattttttctcaagaactcttcatcatttatttgaaccacaatggaaaataaagctagaaggagacagagagaagcggatggagttgaagactgaaggtgtacattaaatagatattagaaaattaccattttatcatataagaaggacaggtgtcaccaaattaaataagggcaaaaatgaaatttccatggcctattgtttttttaaaatttagagtcttttcgaaagaaaaattaaaataatattgggattttgtattttttaactggctagtatgataccttgcgtacataggaaataccactggttacgcgttaaagagataacgtgtgaaagagataaaagaaatgatataatgagtatttaagatttaaaagaaaatattaatttacttatcaaaaaggggtgcaattagcaagtcttaatttgaaaatattggagtacagttataaaaaagggtgtgcagttagcaagatttaatttggaaatattgaagtgcatttattaaaaaggaggtgcaattagcattttaatgttcaattaccattttacccctatttttgccaagtgtcaatcaactgaaaaaggcaaaaacggaatttcatatgcctattgctttcatatatttatagtagatagtagaaggattcaaaagaatcttcgttcattactttttcaaagagtaacctagttaggaaaaaaaattaaaattggacaccgagtgttttatatattctcacattctcactccttttgttagtacgtacatcatgaatctcatttttcctttaactttgctttactaaaaatgtttgctaaattctaagttaaagaaaaaaataaatatgaagcaaatggagttcaacagcacgatcaataaaacagaatgaactctattatacaaattttagatggtgatgattttattattgttgcatattttatcttctatgtttgtttagttagttaatttgaatttcaattaaatctgatagcagattagtttgtttaggatttttaaattgattgtaagtttatacatagacattctcattttatgaatttcaatgattattttatggagaaactttttgattgagcactaaacaatgaggttgagtgcaaacactaggttgaatacaaacttaccaaaaatttaaagcaaaagtcctaagacctgaattatttccatcccaacatccattagtgctttggagaaatataataatataaaaacaatgtaataagaatggtgtgataataatcaatgctttaaaaatcgaattggtgattgaaccgggccagtagggttcgattttaataacattgatagtaactaactaagcctgtttatggaaagacgaagtgtggggacgaaagcaaattaatattggctttagctttaatggtggtggtagggaggtcccatgcatgaatgcataattcaactgcaaacatgactcttcattcttgtttggtagttctttttatttgacaaacaggtcaaacaaaaccaaacctcacgcaatctgctaccagatcgatgcatatcatatatcatattcatatggtatcacttagtaaaatgcaaatgcaggcacatatttcaatttgcacccataattatcttctcatttcacttcaatctgtctcttggctgcatatacatactgtactaccgtgtctctgttcttttctccctccacattggagattcctacaacaaagtctcactttaatttattctatttggttttgttacttttctacactccatttgctattcaccactcacgtgtttgtctcaaaatcggagagttggtttatttactatatataataggaattagcatatatataatgaaaacggctgttacaaatatattttaatactattgaatgatttgtatccatgattggtttttaagatgttctcacagatttatttaacatgcattagttggattttatgtgaatttcattaaaaatacatatacttaagtgttcaaattagttttaatttacaattttatatttaaatgtatttcaccatatgtaaagctaaccaatttaatctccatttgattttgccaaactcctttaactagtcagatattgatggacacatgatttatatgcacatttcaatcgacttatttgattgaatcaacttgtttcaaaattaaagagttttatttagagcttttaaaaataattatttgttaaaattaacctatttcgaaatatacattaagtttaataaacaagatggaaagtatttgagagaggttttataaaagactatttgttttaaattctctttcaatttttttagaataatcataaagatatgaaaatacttgtctttattcttgtccatcgtgcagtataaatgtaaagtaatgttttgtttgattgaaagaaaatgggaaagatgaaaagggaaataaaataaaaataatatgaattatatttggatctcacaccttttatattatattttaatttaaatatctttattttttcactattataatcatttctatcaaagataacacatttacttaaaaaaattctagcggataaactgaaaaaagtaattctagcagataactgtggagaacaatgaagaagatccataacatgcaataatttagttattatccaaataaattttgaggaagaatgggtgtttgaaaaaatacaaaagtgagagtggggaaagagtgaacgaatgacagtagtaaaacaactcaaattgtcacacacgtgcatttgcacagtgatctaaatcacttcacttcacttcactccacagttcactgtactttcactccttcgccattttccaaccccaactttcaaaatacaccaaaactccaaataatataataatatttacaaaaggcaaaaacgttcctactttttatatactcaatagaggcacacacacaacaacaacaaaagcttttttgtgttctgcaactgaaagtgaaagaagggaagcagaaaccaaaccaaatcatgtgttctctactttggagttccattgcattgtgtgtagcactcctactccttcagcttggcattgtgcacccttcaccctctcaccataggatcactcgcttaccgggtcaaccccatgttcagtttcatcagttttcaggttatgtaaccgttgatgacaaaaaccagcgtgcactcttcttctactttgctgaagctgaaaaagatgcactttccaaaccccttgttctttggctcaatggaggtgctcctcactcacttcttgtttcttttcgcacctgtaaataaaaaagttctcaatcagacaagaatttgaaagtttggaaacttatgctttgtgttgtgtcttgttcttttgaagggcctggttgttcttctgttggagttggtgcattttcagagaatggaccatttaggcccaaaggagagggcttggttagaaaccaattcagctggaacaaaggtacctacctatctatcttcttgaacaaatttttgtctatacatatctattgttttccatcaatggggtggtttcaattttagcataactttgagaatatgacatgctgattagcattgtgcacatatgagttgcagaagcgaatatgctgtatttggaaacgccaattggagttggattctcttactcaactgatacttcctcttacgagggtgtgaatgataaaattacaggcaaggttttaatgttcacacttctatttgacattaccaacttttttacttttttagtcccgccgtaaaataattctcaatgttattggtttgaatggtaattggccaagaaccattaggtgcaagcattttcacatggctaaagaaagagtttattaaaggaagatcccggtcaactttctttcttcttaattagttctcaccatctcccgtttgcttttcttgtttgttatctttaccttttacaaaattctgtcctgacccctttgtccaaagttttgcttattaacataatgttatatcacagcctgctattttactttacagttatgccttgtccacttcctaaatagtgctgtttttctttacaaaataaacagatatgctcctttaaagattgccttggttttctgtaacactttgtttttctctttatagctagggataacttggtgttcttgcaaaactggtttataaagttcccagaatacagaaaccgaagtttgttcattgtaggagaaagctatgcaggtaacactaccatctttttatgtttttcaattatgaagaagctatggttaaaatattcatatatttatgtattttgaaatttatgattaggccattatgttcctcagctggctgaccttatgcttcgattcaacaaaaaggagaagttgttcaatttaaaaggcattgctgtgagttatgattgcacaaacttccaattattcttcttttcttattcctgccacgtgtcagcttgcttttatgcttctgatatccgttaagattttgaaaactagaaagcaaaaaagttcagctaaagattcatcagctttgcaatttgactaagaaatttaggcatctgaagcaagttagtttcctttggtgcagcttggtaatccagttctagaatttgcaacagatttcaattcgagagctgagttcttctggtcacatggattaatttcagatacaacgtacaaaatgttcacttctgtttgtaattattcaacatatgtgagggaatactataatggtgctgtttctcctctctgttcaagtgttatgagccaagttagtacggaaacaagtagatttgttgacaaatatgatgtgacccttgatgtttgtttatcttcagtgttctcacaaaccaaagttctcaatccccaggtgagtttatcctatagcttctctttaattccaactgtcacaacaacttgattttctatataacttcaatcaaagtactgagggcatgaaatactggttttgtttttgttgtcaaacagcaagtcactgaaaccatagatgtatgtgtggaagatgaaacagtgaattatctgaacaggaaagatgtgcagtcagctttgcatgctcgtcttgttggagttcaaagatggtctgcttgcagcaagtaattctcctctctagccttcattaacatgttcaggaactaattgagttaaaccttgtgttctaccttgcctttcttcatatgagaatgtcttttagtgttggtatttcgagtctgggacagagtttgtcttgttttcaacatttcatctctaccttgcttaatgctttcctcaacagctttgtctcttgttaacatgaatgttatgctatatgattatgatatatccatcagtgtcctggattatgagctgcgtgacttggagataccaacaatcacggttgtggggaagctagtcaaggagggaataccagtattggtatacaggtacatgtttacatccttatgaagtgaaaattctattctagatcaaacgaatttggcgtagattagagtgtgtataattgcctttgagaatgaattgataattgttgttttgcagtggtgatcaggactcagttatcccactgactggaagtagaacattagtacataaattggcaaaagaactaggattgaacaccactgtgccatacagggtgtggtttgagaagcagcaggtgaaacttattctgttgagttttgctgagattactgatcacattgaatttgagtttactatctatgtaacatcaatgtaaataattttataatgtcaaccaaaaaaaagtcatggtagttatagttttcgggataactgttgtaaaagtcaacaaacttactagagaaaaaagattatgcaataacaatataaaaaaatgttcatccaataataaattaacatgtatgataattttgttaactttgataataactaccttagaagtcatgtttttatcatgatttgtaattggttgacatgtgattttttttatagtatatagtaattaaattcaacatatgcataacaatttgtgattaaatgatattataaaaactgagtgcatatactctttagtctttactcattgaaattttgttgtacttatgaaatgtagcatgtttgtttcaggtgggtgggtggactcaagtttatggttacatcctttcatttgccaccatcaggggagcatcacatgaagctccattttcacagcccgagagatcccttgtgctgttcaagtcattcttagaaggagcacctctaccagaagagttttgatatgcatatatatgttggtggtgtcggtaaaatgtgattgttggattgtagtgtggttcgtttcactgttaatcaatggtgcccaatttcaagtgtagaaaattgtgtgtgttttttttttgttctgtcacagtgcattgtttacttttactatttataaagctgcattacgtaactagcagtaactgtctgctcttaattatgttaatcggtaacatagtgaaataatcttctgtttatttatttttcaagtaaattctggaaagttacaactagtaaaaaagggggaaaagaaagttacgctgatcacaagtgtatcagaactgtagtttcttttctttttttttttttttaatgttaatccctcagttgatcatggaacttcatatacacttattaccttattttttaaaaaaatgagcatcacctgcttatagttatgcaaactagctaaccataattagaagtgcatttttcaaatggctaaacttcactttttttgggtcaaaagaagcaaatatatggaatgattatagtctgtcttgcgggacctaggccaatgagataccgtgttattgttatgcaaactaatgagtagtaatggctaaccataattcaaaatgtatctgccaaaaacacaatggcgtagactctaggaggccagtggaaacaaatcacgaaatgcacttgctagcttttgaaaaatttggtgcactgaatggtaggtacactactaggccaataaattattgatagatgttaatggaacaattttcaggaaatttcatcttaagggacattgaagatgaatatttattttaaaggaatttaaaaagttcaaaatgttaaaacttaaaaggggccacatataatttatttttatttaaagagaaggaccgttagatttcaattaataaacaatattggccttataaagaaatttgtgaatgatccttttttttgttttttttaaagactaaacaatatatgattgtgatttctagtaaatatgagttttatgtatgttttttcataaaaaaaaatcatttttgctttctaataaaacaaaaattttacttttggtcattggtattgttttagtccctaataaattagcatattttgtttgttacttgataaaaaaatttcatttgttattagtccctttgaaaaaattaataacaaataaaaaattattaggaaataaacataaaattcagtaattttaaagaactaaaaagtgtcaaataccaaaaacaaaatttttattttatcaagaacttgatgcaaagaaaaatttatcatgtaccaaatgcaaaattaggatatttgttagaaaaacattttttttataaaataatccttttttgtccttcatgaaagattagcagttataaaaggaattttattttagataaatggaactggaaaaaaattgtaaatgattattacttttgattgactagtaatagatgaatttttatattggacataaaaggttcaaaaaattattaatgagttatgagagttgttattgtatggccatttgttgcccacagtgcgtaactaattaatagtaaataattaccagtttttttatggataattagaagttactcttatagaatcattatttgcaagttttatattaaatcgtaaattaacaataatttatgaatgactattatttagtattaaatagttatttttttattaagtgaataagaataataagaacaaatttattttcataaagacacatgaaaactataaaaaaaatgtaaataaatatcatttattaataagcaattatttatccttaagaagtggccattatttttattatgggaattttcgtccaatacataaaataattatctctaaaaaaatacttatataatatacttttaaaataaattaaacatttgatatttgataagattgaatattcactcatcattctttttgttgtggcacacatatatgtggatagattcattaactcttagaacaacaccgatggtcaatgaaggggcaaaatattaaaagaacttggtcaccttacataaatcattgactaaaggtcttgggaaaaaaatgcaaaaggtcattgcttagctgcttatagaccgttgcatatcttcaccatagatcatcaatacttgtatgacttcggttgttgtcatcagtttttgttttttgtgacaaatgtcgaatttcttatagtgtttatctttttcttttagctaaaaaaaagttgaatccaatgcattaaaagaaaacatttttaaacataaaagtaacttttttaaatgatgatatatataaaaaaaaagttgatagaagttaatttgaagaaatttccactttttaaagagaagaatatctcaatcattagttgagacaaattaagctaaaactcagattgttactcccccgtgcaaactctgtaattatttgactgtaacttgagttatagacgtcatatttaggaatggtaaaacattgagataaaggcttttcacacatacttaaagtgtttttttttttaataatattttccgtttggtgccagtttttgtttgaattcatatcagatttcagtttcttacattacagcttctatttaacattaatactaaaattccatctacctatttcacttgttgcactgtgtgattgccctatcacttgtttaggttaaggtgaaagtttgtgtgatacattattcataaaataaaataaaaatgtttgtgtgatacattattgatcctgcccccttcagcaataatcattcatattttttgcatgattaagcaccaaatatttgtcctatttttgctctttttcgtttgctggagcaagtaccaaatatctgaatgattgagttgtgccacatgtgaaaaaccaaattaaggaaaccacaaaaagttatggcttgtgtatgccgacttcccatttttcctttgattggaacccaccaatttaaggatattccattttcatgcccttgccgttatctatctcatttggatagtgtgttcaactctttcttcctcttttttttccccatgattaatgtatgttgttccttttccatgttttctttttcttatctcacaattatgtccttacctcttgataaatgcttagttttgcataaaatgctttctagtttagataagcaaatcaggtggagaaaagagatatttgtatgttcacattacaagtagaactttgaaagattaccagcaatcggtttatgttaatgacattcatggcatgttcctctaggatacagctatagtactgggcaagaaaagaaaactctagttaacatgactagtcatttacaaacatgatatactagtgtaacctaaaccaaccacaacctgcaaaatcggccaaaagaaaaggaaatagaatagagaaagagaaaatgggatatagagaaagagaaaatgggatattagaaaccacaccattaaaaccaagatcaagcataacaatcaattacaccagaatcatggccaccaaccaaataggggggggaaagggggggcggggaatctctagaaactgaagaatgaaggtttggttcaaaaactgtgcagttgcgttagcatgtgaacaagctcatcactagaaggcctatctgcaggcatatcagagaggcatgcagcagcaatcctaacagccattagcatctcatcttcctcaccttcttcccctaacatgctcttatctagagcttcgtgtgcctcgccggcttgctgcaagtgtctcagccaacatcccaaacttcccccactggctgcttctccaaagaatggatctgtaggatccttacccgttaacaaaacacctagtatcatgccaaaactaaagatgtcacttttgtcagtgtacctgctgaaattgcaaaaaaaacaccattcaatctgaataccatgaagttccaaatacaagaatggaatgaagttaaaataaaaatcttattggcaataccatacccatatatgcaatgcatcaatcaagcaatctttttattgttattatttattgctattgatattgatgcatccagagacatacaccaatgaaaaactagaaatatttcaagataaattgggaaaaaaaacctttgtcaaatattattataatttagttgtggtctcagtcaccaatctaggttagtagtttgcagcatgtgaactgtatattcatttggaccagacttagtgccaactgcctaaggtctaaaacttgacatcaggaagtaatgggtagttacaaaaactaattgcaaagtctttattaaataataccaaattcaatcagcaaatgatacaatgacaatacagattacagaataataactgcgtttcaaaacaagagtctttcattaaggtgctacaaaggtggcaaaaacccaataaggtgtggagcttttgaaaaggtaacgaattaaaaaaaattcccaatatcaaccaccaagttaccctattggtgtaaaaaagtgaaagaacagaaacagaccaagttcaaaacactagtgaatgaccttgattgagaccaattgatttgtcttacctgcaattatggaaacattcaggaggagtgtagagagaacttcctctatccaaattgggtagaagtttagccaacccataatctgccaatctgggttcaaactcagcatccaacatcacatttgtgggcttcaagttgtagtgcagaatctgaggcacacaagtgaagtgaagatactgaagacccttcaccacaccaacagcaatcctgagcctaacttcccaaccaaagggcagctcattctccctcactttactcaacacatcagcaagactcccagtggaaacataatcataaaccaatgagaacctatcaggctcacgaatataggccctcaaactcatcaagttcctatgcctaaggcttgcaagaagctcaagctcagtttgtatctgcatcttcactgattttctcttagcctccggggaattgctctcaaagggtgttagccttttgactgcaatagtgagtccattgtcaagcacagttttgtagtacttcccattaggactcgaaccgagcaagtggttttcctttgccaaagctgattggagtgtcttgggggcaatttttggggagaatatgacaggccccttgaggattggtgtgcggttcagatactgaacaacacaacgaaccacaagtgcaaagagaacagaagaaactagtccagtgactgctcctaaaaccatactcaaaattatcttcctaaggtcatccttgtatactgatgaagatggtggtgatggtgttgacctagaaggtgagggaggctcagaagaaacatgtttactcaaccttccttgacactgcacagtgttgtggtgcaagctgaacaagaagagaagaaaaagtggctgaaatgccaacaactcccttgcatgagaagaaagggtgtgccttttcctaaacatgaaagcacaacacaaacaaacaaagccacaaccagaaaccaatctcagaagctccaaaatgaggcatgaatcactcacatgctcaaaacccccatcaactcaaacacttggaaacaagaccaagaagaaacttttatactttatgctaaaatgggtttaaaaaaaaagttgcaagcataagcataagcatcttcctcaaccttttaaacccaaaatcttcacaagaaagccgtcccaaaaaagtgagctgacatgttttcgccgaatagttttacatattttccaccgaatcccatctttttcctcctctcaccacccataaattttccagcttcacacgaatcagaacaagaatttgaacctataaaagaagaaaaaaaaaacacccccaaaaaaaacccactattccgaggtgccagcagggactaacaaacccaaccaaaagcaaactagacccagaaacaagttgcaatctttttccttggaaaccaaacaaaaagtcaaaaagttgaacagaaattgaaggggcatggacatgtggtggtagtagtagtaaccaaaacttgaacaacaataacagcaactaagaacagacacacacacataagaaaaaaaaaaaaaacgcccctcggaaactaaactgcaatgtgcttaaaacacaaaacacagtgaacgcacacagcatctagagtgagtgagagtgattcagtgattgtccctctgttatgtttctctctcatccgatgacaacaaacaaattacaaagagccatacctcttctgcgacaaaaactggttcccgcctttgtgagtactcagcactcaggacacagtactatgtgggccccacatttgtccgaaagcgaaacatcgaaatccgtgagagggagaatgtacagttcgtctcgaccgtctgatctcatcagactacatctgggccgttgaattaaggttgcatgggaatttgtgatatgctatatgagtgagtggttaacaactctagcgattgttatgtttggtgtgtgtcattaataaagttctctctttttcgatcgaataattgcttttaattactacttacgtttcaatttcaaataataatatatgaatattaattaactaatatctttaagatattaattaaaataaaaatatttattatgaagattataaaaaaaatataagaaaaattatgtataatataattttgcgtttcttatttttttttaaatttcttaactaataccttaacaatattttttattatttataatgctatatttgcatgcttttacttttcctctttctttctatcttaccttttcttttcgttttctttttctatgtgataggtggaagttgctaggattaggaacgcctttaatcagattttaatcaaattttaactttcaagttctctcgtggaataggaaaaattctttatgacatttttggattgtttttaaatttaatagtcaaaattaatttctcattatacccattaaatttaaaaagaaaatgaatcgagaggataagatacactcttcagattaatgtgatgtaggaataggtagtgcaattgaatgagtgttgcattgaataaaaataaatcgaattatctaagcataataaatgatttattcgagtccgaggatctagcactatggggtgagtgaatgagcaacacatgttcgtataggtgcaagcaatactagtatgaataaattatcatgtttgttttgttcatttgtggcatgagacattttgaaatcagaaatgatagtacgtagattttaaattactagtataatccaaatcaagcatttacaaataatatccatttggtaaattactagagttaattattatagcaatatacattttaatataaaatatatagctaagattaacttaaatatatatatatatatattataactatatttaatggtttaaaactatttctttcaaattctaaaaacagacatataattggatacagtcagttccttttttttgaaaaaaaaaaaaaaactaacaaaatgaaaccaagccaaatgcaacaaataattcagattgcgaatttcacatattaggtgcaactatcattttaataaaaatattaatgccgttcatagaccagtggtgtctttgttgaatgtcaaatttttggttgatagtcaactatttagacaaggcattgtatgctttgacccattagtcataaatttatacttgaaaagtggtttcgtgcaagggaatagaattatgtgaaaatgaccttgaccttttaaattaatttaaataatagttaatcaaacttgtgcaccaaaatttatgcttaaaacacacgccaaatcattgagtctttttccctgaaagtattctccacaatgtttaattcagtttaggtaaaatttaaaaaagaaaatactgagaaaaaataaagagatataataaaaaagaatctacggcaagttaaaatcaacttatctaccttaagttttaagaagttctcttatttaacttttccaaaagtaaaaaatatataatttgattttaatttatttgcctccctattttttcctatgagtattcttttaataagtttatacatattggaattatcaggaccatatttaatataagatttcgcgaatagtggtcttattttataagtaaactctttattttcgtaaaatgcaagtgatattaattatgtcctaagatattaactttttactcctagttattgaaaaattatattaaaataatgttttgcgtgcaatacttaagatggtaaatcgtatcattttctaatactgaaatgttaaattgacgctaattttttcagtaaatcaaatcaaattactattattttaataattaaaaaacagaattgatgttcttatttttcaaagactaagttaatatcacttgtatttatttgaaagattacaaatgtatctatcctctaagttgtggtctcgttattagtcataacctagttcaacaggccccacttcaggtgttgttacttggtcactgatatcaataattatgttgaggtcacccgtgacaaaagttgagttttagttgatagctgtgttaacacaacatgagtgttggccactataacctacaagattcctcacggtttgttttgtagataaaaaatgtttatgtaaaacagtgaaaattcctattacaagattacaaaatatctagacctctttgattgttgtatttgggcagcaaatgtgattctttactgttggatacaatatatacaatggacacttccacccaattcttttttttggaaaatatataaatatgtatattaaacaaaaatgatatacaactacatggggcatctcccgatcatacaatagccataagggccaacgaaggacatcacttgctcaaaaagcaaatatacacaatatcagatatacctggaaaaaccaaaaagcaaaaatacatttgctagtacaagtgagtcaggtgagcatacctcatcgtcctaagcttaatcctatcaaccaagtcagctaatacaaacgaatggttatcaaaaagaatgctattcctacagtccatatgctgaaaatagtggtagccaaagcaagacagcggaactttcctcggatgcccgaaactgccctatggtgcactaaggcattaagcactccctgaagagaaatattattcctgggatattgtgcccaattcatgatttccgtccaaatccttagagtgatacaacatctgaagaaaagatgatcattagattttggatgctgcttacagaaacaacatagagagcccttttcaagaaaaggggccctatccagcgtgaggagcttatgagaagccgccagccaaagagtgaacgcctccttaggtggattagccgaattccagaccacttttgcccaaaacttgttaggctgaacagatctgaaatattcataggcagtttcagctttgaagcctccccgctgaacccaagaattcaaaagggacacagccaactccgggcttccctcctctacaaccagcccatcctttatgcttcccagccttttcatgagagcgaaatttgatttcgctgcatggaagctccaaaccgaaccaccgttgaagtaaaagtggctgacccacttcacccaaagggattctttttcgaaagcaaagtcccaaagcaccctggttaagagagccttattccaggttttcaagtcatgcagcccaaggcccccttcttttttgggggtacacaccactttccagcccacaagaggtttctttctccctacatcaccttttccccacagaaaattacgacaataagcttcaatcctctcaattacagtcaccggaaagggaaagagagccaaccagaagtttacaatcccaccaataacacctctaagcaattccagccttcctgcataggagaaatgcttagagtgccaattctgcaccagccctccaatcctgctgagaagaggagaataatggcagacgttcaacctggaggccatcaacggaatgcctaggtaacggatagggaagctacccgggctaaaaccagtgagagcatacaggtcagccatagtgatatcatccacccctgaggtgaaaatggcatatttgccttggctaatagataggcctgagatgctgcaaaaataagccaacttattaaaaatggtggctactgatggatagtctcctcgagagaagagaagcaagtcgtccgcaaatgtcaggtgagtgatgttaaggggggcacaactaggatgaaaattataaagcagattgttcttcaacccattgaggtctctggacaaaaactccaagcagatgacaaacagataaggagataaagggtctccctgtctgatgcccctctttccctgaaagtgcctgtagattttacctttaacagcaagactatacgaagtggtggagacgcactccataatccagccaataaatcgactcggaaaacctagggcatgaagcatgtaatccaggaactcccaagatatagaatcgtatgctttgtggagatcaacattaagcatacatctgggggagtttctcttacgggcatatttcctaaccagctcttggaccaggaaaatgttatttgccatactccttgctttcacgaacgccacttgcgcttgatcaattatagagtcaagggctggtctaattttattagcaagaacctttgcaattatcttatagattaaattgcagcaagaaataggtctaaactgggtaacccgagaagcattggctgccttcgggataagagctataatagcatgattaatttgtctaagcaacctgcctgaactgaagaattcttgcactgctgcaactacatcattgcctatgactgaccaagcctttttgaagaaaaaaacgttgaaaccatccggccctggggatttatttatgttcatctggttaacaatactggtgacctcctgagctgtaggcaatctgaccaattctggaaaaagatcaacaggcaccttattgccttgcaagctgtcttccagagaagggagattcgtaccatgcgaagtcccaagcaaggaagagaaatatttcacaaattcatcaccaatttcctgctgagaccccgttctgcttccatcctctctataaataaccagaattaactttgcatttctgtctctgctgatgagagaataaaaaaatctggaattccggtcagcctccactaagtacttattcttagttagctgagctatcttgcgggattcagctaacctgagctcattaatagctgcccgagcagcagctatttttaccattaagttgcggttattaggcgtttgttgggcttgaagcaagtccttaaggtaactagattcagcttccttaattttcctttccaagtcaccatattccttcttatacagctccttcaagactggtttaagcatcttcagctttttacaaatttggtatatcttgcagccttgaatttcaattgtccaaacagactccactactcgagaaaaatccctggaatcagccaccgcattgttaaatctgaagatggacttaccaacaggaagggaaggattcatattaacaataagaggggcatgatcagacactgagcagaaatcctccactgctgcaaacgatgatctgaaaacagatacccactgcatattgcaaagggctctatctatccttgaccaagtatgaccattagtccatgtgtaagagctccccaccgtcctcaactgatgaagccccacatcggagcagcaattattaaaatctctggactcataagctgtgacatctgaaccatttttcctgtcctctggattcaatacagaattaaagtcccctagaaccagccaaggacctgttatattgctagccacctgctccaaagaactccacatgtgccttctttccgatatagaatgaaggccatacacaaatgaagctgcaccttgatcagtagtaatttttgaagcaaaattacagtggattaattggggagtgaccaccacctccgtgatgtccactctatcttttctccacaacaagaagatcctcccagccccactaagattgaaattatgaccataagcccagcagctaaatctcttctccatcagaccttttagataaccttcattgagcttggtttctaacaaggccactacatccacctgtttctcattgagaaatctctgcaccgcccggtgcttaaaaggggcattgaagcccctaatattccaagataagaaaatcatctctttgtccgggaagaaaccttcccttcaaaagaaatgacaaattttcccatttttacattgccagccttagctgtcttatgctgcatcttctgttgggtcttagtaactggcccaacgttagaggctgctttcttcttcttcttcttagtagccagttcccattctccatctgattggtcaccagaggaagcatatcctgtgctgatttctctctctgtatctgcatcactgctatcatcagtgccatcctcaactaggggtaacttatctcccaactcttttttcccctcactccttttgtctcccatgttagaaacaggcttctgatgtgagagatgtatggagagacccccatccaaaggtctagactgactggaagtaggctgatctgaggttttggccgaaacccctgattgcctgggaatcagttttctagtacctgctagatcaatatctttctggttctgttgatagccctgcaacctgatcgaattacccttgtttttgtctctgatcccaggttggcccccctgaacctgaagctcattattttccttagaaggattttgcgtagtgttgcaactcttagagtaatgccctattgtcttacagacgttgcagaaaacaggatttgtttcaaacactatctgctgcaagaaggactttcctgttgctgttttcaccagcacctccgtaaccaactccttggaggcatccacttctactaacgctcgggcaaaagagagtgatcctctagaagccgtcagctgatctgtgcgaataggggtaccaactcttgataagatttttgctagagcagaggcattccacaattccaggggcaggttcttcagctttacccagaccgggaatttgcttagttcctcatctccaaaatcaaagaggtcaggcataatctttaacaagaggagtctctgataaataaaataaggaccattggctagcaccaagtccctatcctcctcagatcgaaatctgaagattaaccatccacttgcatgggttgagtaatggaactccactccccatttctggcaacattgaagcaaggcttttttccctgggaaccttcctgcaacatatccaatgaggccaaaaccccaaaccttaccaaggggttggatgtcctctttctctaaccagacgaagtctggattgtccatcgccactggttccagaactatgcctttggaaggctgcctgttatctttaaacaaatttgcccacttattcttctccttattgctaccatctccctcatccaattcagcacctccttccactgattgtgcaacataagtgtctttcgtgcccaaagatatggacccttcaacactagaagagggatcagcctggagacatctgacagggttatcagcaaccaccttatcatcttctgctaccaaaggatcagcaacctgttcctgcgcaacttcatctacccttgtgtttccatcaccagaacagggcatacggtgaaggacctggaacactgtcggactagatgtttcaatggagtcatgagaagatgactctggcggattgaaagccaccttagatgctcgatcggtggtcaacaatctctcctccccccgattcttctttttagactttcccatgtctccaaacacaggacatagaaagcccagaagatggctctacttacccccctactgctacgagaacggccacaagagctagaactcaagagaggaaccctaacctgcaacaaaccccaaaggaaacggtccaggatctccgttccttgagaagaagagaccaaacagatataaaggtgtgcagattacaatgagattcacagaatacacagactcattctcaacaaataaactaagatattacaaaaacacaaaggaagccactgaatcgctgctccgggaatcaaactttgaagaagaaggagcaaagaactggtagcctcaaactctgcacccctactcagaacaaggactgaagacaactacttgtgatgagagaaaccacctccactatctagcagccaccaccagttggggatacggagtgcagtgaggaagttcaggccccaccgtgctcaactcaagctatcggcctcactacttgaatcgaatcccagacccgaagacttcctgtgccctagcgccgctgctactgactccgcttgactagaaagggtgacgccgaccttcgtctccaccagagaaacaaaacccaaggcttcaaagtcccaaagctcgtcggaggatatctctcggagccgcgatgagaaaccaaccagataagcacggggaagctctctccgaggtcgcgacaaaacccagtctacccttcttcaccgagaccgactgttatctccgccaccacagggtggctaagaatggccgagacccttaaaggtcggcctcgagcttctgctttcctcctccaagcactggtcgagagaaaaatcgcaacttttagtgatgtctaagagagaaggagagagtgagctacttcggaagtgatcgagacgcgaagggagcaagtggccgacaggtccgccacgtggcagctccagctactccactccaccaccctctccactacacgggttggtgattccctccagagagtacaaaccgtcacctccttacaaacaaaacaaaggcttcataaatgctataccacctgcacccgcaagaactgctctacaccttatagcatcaacaatcaacagccaaaacagcaccaaggggagaaagcgtaaagggaacactacggcttcacctcaatcttccaatccgatagccatggctacagggaagcacccaagggatggagattttggaaaccctcatgttcttacgtttatgcactttcttccttcatccccgttattcattttatatcatttatagtactggctacgtactacaagtatagaatagcagctgaattggaacgtggagcaatcgagtacatgaagttgtattatgcaacgaatcctcgaattcgctctctttctctgctgaagctgaaggatgggaccctgtcttaatcaaaagaaattctctcacttccacccaattcttgaatttactattgtaaactgggggtgaaatggaccacttcacttttcgattcaattgaccaaaaaactctcatgccttcaacatggtgccccacgccgtcttttcaacaccgaaattgtatatgataacaataatttgggtttttcttttgggagggtggtatttctataatagcaggtgattgatagttttctttatctttttgcctttgaaaataatacatcagaacattagagaactagggacatggcatcctcagcacatgtcccaccaagtaatcccaaaaatacaaaaatgtaaattacagccacaagaacaccttcacaaaaaccaatgtacacaacatacacaaatctctagtctaatgcatcgcagcttcacctcaaaagtaaacaaaaatacacaaacatcatattacgaagtgctggctgggtgctaccagtgcagcatatgcataactcttttactaagaccaatgtggccattttacaataagatcttagcactattttgcacaagatgactaagggcaggcatttcaacctacctctctcccttaatccttcacactagtgacatttacttgaaaaaacagcttttcaattaatgaaatacaaatttacataatccaatcttccatattttatatgtgtattatactccgaggtttttgcctatcactcatccattagaatcagtcgatggagcatggacttctctgtcaccgccagcatttgactctgcagcaagctcaataggggttcttccctgctcatctacagctcgaggatcggctcccctgcatttttaaagattcagtgtcattcaatgaaccatttctttaaaataaattcagaataggtgcctggaatggtcattaaatgaaattataagtgtgaagctgactattaaattgttgaaaaaaaccagataaaccatcatataacatcagactcacctagaaagcaataatcttgcaaatatagatcttcctttgagaatacagcgatgtagtggtgtttgacctctcgaatcagttgcattaacatttgcaccatactgtaggaggagctccaccatgccaatatctgcagtttcacatgcgagatgaagtagggtgcacccatctagattgtccataacctggccttctttagtggaggaccagtccaatgtgttccctgctagagtagagctgtgatcatgactagtctgctcttgtaatagcattactttggcaagggttaaggagctgctgcatgttggctcataaacagcattaacatcaacatcagaattaacaatgtaacggtatacagcttttttatcattagcatgaacagcctcccagatttgttgtgctaccaagagacggtattgattgtcctttggattgcgaacaaaaaacttctcagcatactgccatgaaaaaacaagtggttcagggagtctgaaatacagcaattagaaggtagcataaaaggctcaataataaaaaaaaaaaaagtaaatacataaacacagttaatatagtaaatatatctccaggtgcttggccttacagcccaaaatgcaaacaaataagctatgcattgctgtatataaatcaaccaaaatctcaagtcaaatagagatcaccacctcattcataccctctggtcattttaaaagttaattaaagagtatgctttcattaataaataaaaattataagcactcagcagtgacaatttagtctccaagtttctgcactagttttgtctgggaaatatatccaattatcattaagttctgctaaagagcttagacatgagatgcatcactttcgtttgatgcctaggtaggaattctaattgtgagaatcctactttcttttcttttttctacagcttcctcagtctaaactctcatctggatttatgtgagacatattactttaaattagaccaaaatcaacaaaacattcttcctcttattccctaaatctcaccattttacaggtcttttagaaaaaaagtagctgaacatctttctctgttagaaggagttgaagtatagaggcagagtatggtcatacctttgcatggatgaacttttccttcacagatagagaatcagattgacaaggtttggtgatgaagaacatcattggtttatcagacttgcttaagcttcaaattagtagaagagaatatcagcaatacttgtcaaacaataataatagtaataataatgggtctaatgcaaagatataataatggggattctttaccctgtagggacaagatcaacctgaaaggcacttcttgattgtaataattcctcccatactgagttggcaaaagtattcccaagagactgaaataaacttatgacagaaggttcccacactttaacatccaatgtaagagacctgacctgtaacaatagagaaaaaggagttagatgatcaatatattacagccccatcacaaaatagaagtgacagctaaaacttaaatatctaaccagctataccttcaattgcaatcatcatcacaatattaacctctaagttactatatataaaaaggcacttacgaagtgggttgcattttataaaaacatctatgaacatttgtgtagtttattataaaagttagatttcaaagatatttcttttataaaagaatttatcagaagagattagagaagagaaataaagaacaggagaatcaaaaccctcctaaaagaacaagataccagtaaaaaaaattacagggaaaaaaatcctgaaggaactctcccttccctctgtatatccaataaaaaattctgtttgctgatattggatttctaagaattaacaactagggcaacagtggctcttcaaccatagttatttcacaaagacaaccaactgttttaaattacacaatttatatcaactcctttttcttttattacaccatgctcattgtcaagcatcaaattatattcaagagtgaacaaataatttgcagatataacataaacaaggatcaagagaatggaattgtatggtctacctttgatatgtgcacaccaaggttacgatgtacaccagaacactcaatgcaaacaagaacaccaagatttagcgatgcccaatctggttcaggagctccacaatcggcacatttatcattcccacaaactcttcgcaacacatctattggcttctcacttttagtgcaggatcgctgctgttgcaaacttcttgaggggcgctccagatgcgcagcagtaaaacttctatctgctgcacattcttcaacagcagagtgatcaaaatctgaactttcaaaagaactactctcactggtagacctatgatgaccacttcccattgggcttgcaggcaacatctgataacaattgcaagttgcaacattaatcaaattgacttaaattttatttctacacgatcaccaaaagttcttggaagttaccctatcaggaatctgagaactcagtaatgaagcaataacaccagtgattttttcaatccaatccatctggtccagcgcactctctgcctgcactgacaagcataattaaggaatgaaactataaagctttaatcagcatccttgtatgaataaaaaaaaatccaaaaagaaatttaaataacctgcaaagtgtagttctttgttggtgaaatgatccggaagcaaaacctcaaatctgattggtcagcatctactttaattgttgacgtaagcaagttcacagtgtggtgagcaacagatttctcatcatgtactccaccatgatgatgagaagacagccatcgacttaaaagtccagaaccaagctcagaactattcctctggccagaatgttgactactagacccctacacatgaaaataaccacaaacatgaggtgaaatttgttataaagaagcaattattttaggctttaagtccttcaaaaaaccaacttatttttcacagtacacttcttacagatgatttgctgcactgtttacggtagtaatacagcattccccgactatcaagaacaaaaaacctccttttccagtccccccttaagtttgaggaacgctttgagagatagccttgtcgaatagtttgaacctaaaatgatgaaaagacaagaatattataaaaaacaaccactaggagaaagtaattgttaataacttcaaccaacaatttccaggcctcaattccacctttcccttggcagcagattgcataactgcctctatcatcttatgtgaacttctaccaatggcttgtataccatctccattaggagacccattagaaccatttgaagcccacctactctcccgatcaatctgtcgtttgtactcttgcattctttcatttagggctgcctgctcataattggacctttctcttgattgctgagcataagtcaagacctgcaaaacaactagcctggagtgaatcaatttattttcaccgactcaaatgtctgccaattaatcaccctcaatgtaccagttgataaatgtttttataaatgacatgtacttccagaaaccaaaatatgagtgtataaagacaaagttgattccaaacctggttaatatatggctccatttggtgcaacaattcatacccctacaagtgaagtaaatttaagatgagcaagttgagacagaatgtggaaaagaataatttaagcaatatgtctacctgtttgaagtaacgaagatgtgcatccatggtcccactgactgcttccaaaaattcaaatctcttctttgcttcaacatttgacaaggcagtaacctggacaaaagactctttgagttttgtgaaaacatatgtcatggtaacagcaattatttatgtacttccgatcaaatgaatttactaaccagattaaaccgagcttgctcaaatgtagatcttgcactatgaagctcctgaaacatctccaaacatttgaaggattaaagaatcacatataccagagtgaatctaagctgaacaaacacataagacacacaagggcctacctcttctagggcagtagctacaccagtttttgtgccttttcttagtgacagaaacctttcacgagtctgcaagaatagcatatttgccaatcattagagaaactttattttgcagcttctaacactgttggctccaaaacaggttactataggtgtattttaaaagctttggttcatcttagtagtcaattcaaattgttaaattcattatatatccattgatttcattctacttgaatggatcattatcataggcagtatgcttagcatccatattgttcaaagcaagaggaatttacatgggaaattagaaataatttgtgattgagaatgcacctggtcataaataaggctagccttgtcaaagcgtttccgtgcttcctgcattaagagaggataccttaggacagaaactaagtgcaaaaattgctcacagaaattttaatgttggaagtaaatatcaactatcctcattattaggtgatatttagagtcaatattaccaaaataaaaccataaatagcctataaagtttaaaatgcttcctataatacactaacaaaatcataacatggaaaatgcaacctaaatatttacctcatatttaaagtggaaaatcttaaaatattgagagttgggagagaaatttagctcatatgtaggatcatgctgttttgttaaaagaaccaaatatttgacaagcttctacaggagtgacatctgtccaattttttttatagaatctagaacaaaaatagacaatactactattcttttcacaagggcttcaagagaattccggctcgaatcctaaacctgtgcatgtttggattagcttattttttttggcagctccctggccagtctgctttgcaggcttattaaccgtagaaatcagtgaaagtaaagaacctgagaaaataaaggggagagaaagaagcggcgcgggggaatcagacctataggctgcagctcaccaccaaatgacacgtcaataacaaaaatgggtacaggacagatgttaaagatatatcgataaggcggttaattcttataatttaaactctcccaaacatcctagtaactaaccaaagaaacgaaaaccaattaagagcaaagcagattctaaatagaacaaagtcactcaaaagagcctattacttcacaggtttacacactcatactagaaaggtatatcaattctcacatcagttttgtacacatctaactgacagggtaaacaaaaaatattacaataatttttttctttagaacagaaacaagaaaagaaaaacagtaccttgacttcttgtaaatcaatattgacaaactgaagcaatctgtcatttaacatatgctcaacctgacaggaagaaaacaatctatgttaacagtgtagcagacattgtgttaccaaaaactgatggataatggccaaaaaatccaggatgaaacttccaaatagccaactgctaaacttcataatgggaaacagcttccaagttgtattctttacaatttgacgtatgtattggaaatagatcataattattgataactaatttttccccttcttggaaaggaagaaattcattaagataaaaaaatgttacagagagattggagtaaaagatcatccactttacattttctctctttaaaaatgcatcattaggagtcagtaacaactagagaagtattaaaaaagcacttacaagtacaacacaatggtttacctgtgatcgaaggacttccttgtatgtcccaatttcccttaaggctatggtgaatttggtcataacagggcctggaatagaaactcaatcataaatcattgcatcatcattagacttttagagttaaaggtaacatacagacttaaaatcaaattatgaagtcaggtagtcccaagcacagtcagtagtcactaaattatagagaaaaactgcaagcaaattatctcagtaagaattaaaattattagaatgaaagtattaaaagtcatcgtttttatgattgacagcttatctgcggtgctaaaaatggaaacataatcaactaccaggaggaacagagaacctttcatcaaccatcgtaagattgatgtaaaaagggagcatacctccaaaagccacactgattgggtcattatgcccaccaccaaaagtttccaatgcacttgcaaatgcaatatctccatcataggcctccccaagtccttcactggaaagtacaaaggtaaagcaattaaggtctataaagaaaatacatatctaacatcttcaaaatcaatattgaatgtcatgataagctgtgagaaactcctaacaattcataagaacagggagaaaaaagcactaaaattttcctttggatgattgacaatgattgttgtataaaaaaataagggacatccaccatagaggatataatagtgtaacccaaaaactattaagtagttggatataaatgttctggaagataaaaaatacgggatgcttttgaaaggagaggttcaatacaataggctctagcttgaaaataaaatgccatttatttttacacggcccattagccacttttatatagaaattcttgtgtttaattccaaaggtttggcacaaatatgacagttaaaatgttgcattaccatgcagcttatgctgttttttggttgaaagggaatgcacctatatacacaaatacttttctgctcttaaacatgctgccacatatgatagttttcatgctactctttggtgttctgttatcttgattgcttttgctgtgatttatttagagcctttctcaaggacatctcaccctcttcttttatctcctctgcattctcattataaaaactattttttctatccaaacgacagtatatttgaagctgatttcatctagtcatgaagaaaacaaaccataaaaactgacctagaaaataacagataaaagagctaagctaatccagaactaaacatttgaaaagaaaaaaacatgatacttaaagaataattaaaaactgcgatttgcatgccagagatgctttcatgaaaacaaggataagagatattatgtgagcaattcatcatgttctcaaaggttcatggctttttagtaataggagttaataatgataagatccaaagacaaggaaatacatacgtgtatttctacatcctttgtaaaattttaaacttctctctcttaaagattcagcactttcctccatgcattgtatctgttcatcataaaattcaagaataaacaatcttaggatacatcaaattggttaagggagaacctaccaatttgtattatatgaaacttatgaaacaaaaggaaggaagtgaaaagacccacatctatgttgaatgtggcacagcaaacaacaaattatcacacatgctatgcaaaaataacaacaacctcagagaagaaccactaaatttctatatttacagtgaactccagttatcatatcattcaatcaaaaagcaatacactatatttcagaatcacaccctcaaatggtttattagagcataaaatattattacatttcagaatcttcaacagaacccaataatagaaaacaatggattgtttaataaaagaagaccaatatgacttaacatagtaacagggaagaaattgttaagctggtgaagtaactggagcaatgcactaaacaatctatataagaatttcacataaggataagtttagtttgcaggtagcagggggggacagatttttcaaggagtaaattttaagaatatacttatgtttggcatatcagtagaagatgaggaagctttcttggagcaatttctccctaattagggtttatgttgcttgacagttgatgcctctctcactctcactgctcacccaagctctacgtaaatcccacccatgatgcctgatcaagtgtgccaaccatccctgactaacctcatagaccagcaaaccgtaaattaattcactgagattctctttcagatactggaaccttccctctccatgtgtggcagtagtacataccataaatctatgaagggaatcaccatgccataacccattactagaaaacagagaatcccatgaagggaactacttgtttcccttatctgggatttcccagaattacaaaaagaacccttaggattccaagcataaaccaagcttgaaacgccattcaaatttcagaatattcacattccacttgaaaagaccacaacatgcacaaaatcaagcttccatttccttctatgttactcaataaaccactacaaccacccgatcaagctcaaaaataaacaaaaccctgccttatgcatacattacacacaccatcaaaattatttttcaacaaatccaaaaaaaaaaaaaagtttctagaaaaaacaagagcgcgtgacctgcttgcggaacataggagagtcatcgagcttagcgaattgcatttttgattcgaaccgaggattcgcacgttgttcgtgttggtgttggtctaagagtaggtatggtttagcattatcacgccatgaatgttcgatctcggaatcgaagtctcaaacagcaacaagaccatttgcagcggcctcaagctcacttcgatttggtcgcgaacccaaaaccctagcgcagagacaaccttggagttcgaggttgcatatgatttgattttgatgtgtgttgggtattatcacttcactatttgtgtgttggtgtcactgcttcttcttcttctcacttctcatcaacggaaatgaaatgaagaaagaaagaaagtaaaaatatattgggaattgtttaacgaaaattttcactaatccaaccaaaattctcgaatcgcatgtgtaacagacactcacttggactaaagtcacacccattgagttccttttcatgcacctttccctttcttgcccccttctttttctttttttatctttcccttttcatttttttcgtattttaatctcaatactataataccctagtaataattatcatcaccttgaagaaccagcttagtaagtgctgtcaaacttgagtttttgggtacaaaactttattgaaaatctggataaagaatattattttctatccaatttgaataagctttttgttttagaaatattataatatgtttgaatgagaaaaaaatcactatgataattaaactaaaataaattttacaatctcattgtgtcgatcaattgatcaatgtataaggtggtgagctaaattatttctatacttttcatactcaagacaataattctaagcttcacaatctcttgtttcaattgatcgatatattaagtgatgaggaggattatttttccatttttgcactaaagacaatagatccaagtatttaacagagataataacccccacaatcataaaacatcaagtgttcaacatactcaattatgagcaatattatctttctatttttgcaataattttaaatatttaacagttatatatcttattatttaaaattatttatgattaaattataattaattttggatcaatataggtgtgtgatgaacaaaattatttctttactcaaataaaatcatttctcacaaaatgtttttatccgctgaaataagattatctgcagaaataaaaaatatatgtaactccgtaccaaaagaaattaacatggcatattagttaatatatatatatatattatatccgcaatatgaattggattccttattgcaactttttactaggagttaaaactgataattgaaatattcctgtaaagaaaaaacaacgttgtacgctgtcgtacgagacgagaagtgaacggcgttattattctaattctaacctaatctaaacctcttgtcgtaccaaaccaacaaggaggccttgtttgatgggttgtgttggagcacgcgctacagcggagcgtggaatgattaattatttcagtgaactatgaaagagggaatggtttgtggggtgcggaagtgtccaaaactcagtttccctccatttcctcgaccgtggatggggcccactctcccaggctcaacaacaataatattcttctttttttaaataaaactgtttttctctttcttttttgcattgtgttattgcttattcttattttgggtatgcaagaaaactgagaaataatattgaagaataatttgatatttgttttgtgggattcatatattttatattgtattttaatttaattttttatttttattctctatatcaaacatgctcgagatttgtgtcgcttgagatcagaatgtattatttacataagtaattataattaatgcaattaatttataagtttatttaattgaaagaaaagtatttgatgattggctttattttaatatttttaagtttcttttagacattttttaaagtggtatttgaattttcaatttatatttataatttataatgttttatttttattttaggtattttgatagaatttcctatttactgttttttaattttcaataaaatatttgatctataaaccaaaaatagttcaaaattaaataaaaaaactaaacttataattacctaaaagtatatttatccaaaaattttataaaaataatttttataatatgtttttagtttaattagttagcttagcaacattttgtttttaattaaaaatattttttttaactttcaatttatttttcaattaacttctcaattgttttttctacatataacaaagtacattacttacgatttattgagaatcaatctttaatcgtcagttttgtaaatgattgaaataatttaaattaaagtttactcttcttttgccctttaaatataacgttatgtgttattgtgtgcaatttaaaaaaaaatattaaatactagtagttcatcaagattattttccttagacatattagttcctctctcagtgtaacctcgtttaacataacgaaaatatctaagttggcacattaattatttcacacgttaattacaactctatttgcctataaaaaaaggttaattacaactccagttctccccagtttccattgagtaaaatgtttttaaaatgtcgaataaagactaaatcttgttgatacggttgcacatggtttcttaaatgatactattagctttgtgcttaaaatggaaaccatgactctttatatgttgaaaaagtactataatcaaaagtagttctgattttctcatgcaagaaattcaccttttgctgtatattattacattaaatagagttttgtgaattcactccttgagcataaaagataatcaagtctttcttgtacctcattacgagtgtcatacttgcataaaaaaaaaatacgagtgccatacaaattattcaaaaatattcacatcaaagcattttctcagagcccaagcaatgaaagaaatttaatttattatactcgtgaatttgagttccaatggataattgattatccctaagctatcttgataatcgccaaccaggtcttaatcaggataacctgtgatataatcagtgaagaaatgtcaatatccacccttgagattattgttgtttcaaatatggtgtacaacttcttttacaagaactcaatattatatagagagtgcataattgattagcattcaaaagactcctatcttgtaaaaaagggaacacctatagtcatcagccatcaggcaacaattcataaaccaaatggtattctatgcctatgtgtggaaaaaaaattatgaatttgttaatagactggtccgtgatcaaatcaccttttgggtttcaccaagagcaagattttggtgcctaatagggtgttgggaaggtttcagggcatagtgatgattatggaaaagtgacagagtggcaatagagaatgtgggaaagacattggaggattataaaaacaaaaacatttttagatatgagagattaaattatattgagtaatttcttttaaggaccaaattgagtccatattaagatctaaaaaatatatattttatgcgttaaaatttatgagatatcctctcaatttctcaactagctaacacagataaatactttaataaagttaaacaaatttcaactgacgagaggttaatgtgttcaagtgaaacaatattaaaaaaaacttatttgggaattttcttcaaagaccaaattaatgcttatgttatttttttataacgtaagtttaccatttacgaaatcaaataaattgttttacaaattcactgcttgcgaaaaataaattgtcaaatctagtttgatacctaagctgagattcaagacataagggattggttgttctggcagagcctaacttaaataacaatagtttatcaaaaaaaaaaaaaaacttaaataacaatagaatagcttgctaaaaaaaagatatgaaaaataataatatatgaacacatttaaaatctatttatttctatctttatttttttatcacattatattattttttatatttatattttttctcttttgtttttttctctctcactgtcaaatagcatagaatatatatgcattattgttcagtattcatccataaatttgtagaaagatgacggtgtacaagagaagcaaaatattataagagcacacaaacaagagacaactaataaaaacaccttaatttataatatcacccaagatatgcacaggtgacaggttctaaggtgctaaagatgtatccttttttctaattaaaagagaaaaacttccctcaacttagttaaagccatgaatctagacagaacatgtcacccaaagatccaaaataaataaaattaacttaaggttaacctggtctgttccactttttgcctttggtgctatatccgtgaataccagggaaagtaaaacggactaattcgatgaacttgacttctttttctaaatagtaaggttaactcaactaaaaaaaattgtggaaagatgacttatacgagaggcaacatattgcatgagcacgcaaagagataccactaataaaaatgtaccttaattagtaatagtaacttcatctgtacaaccgctttattgaccggggaaagattcatataacctcactgaaagaagaaaataaataaaatgcagtaacctccaaatttgtgtataaaatgccttagtgcagtagtaaaccacaaaaaagtggcataatgcagacagaagattaaaaaaaaagggtaactagtatgatgttcatcttctagaaactatcctgagataaattatgggaaccactattgttgactccaaattgttatgtacactattctattcggatcctccttgctctacaatttatcagcaattctccctagagcatctgcaagcttatcaagtacagcaactatgttacttgcagtgtctttctgctgttggcgatccaactggaaattcaggttctgagcttcaagttgatcatgtagcattttgccattcttttctaagacatcaattaattggctttgcaaagtttcctcctctcggtcggctgctaaccgcttcctcttccgttccccttgagatatagaacccatttctggatttggggttgcccgtttctcattggtagtacctacaaaatcaaggaatgtcaacattgaatttgcaataatatcatcagttaagtccttgacactgtgattgtcaaagtagaagctttgatcctattcttatacctattataggaagctacagcctagctagagctcataagtttgggtaatagcataatgaaagctcgtgcctaagacccagcttgccatttattattagagaataactttctttctgagacatgaattgtgaaagatagttgttaatactattagggtaggcttaggatgtggaacgttaaaagaaaaagtgacaatgagacctagagcgcactacaataacttccccagagatgtgcaaacgtaagcatgtgtattgtgtaagcagcactactcgggcaaatatatgactatacatcattcaattcaatgaatgcaaattccaatcagattcctgagcatccaaaatagcttttttacacatgcatccaagataattttaagtaaacaatcatacattcatacattagatgatccaaaagtagaagggtaggcttattgcaagcctattaccattttcatcttcaaataacccatcattttgtttgtactagagtggacaaatttgatatgcaagaatcggatttagattccagcaaaagcaacatggtacaagaaatatggataataaaggaatgaaaaaaaaaattgtcctggcattactgaaattccaaatgtaataacaaatttatgacagaaaataggtaattttacatgcagttagaaattagaatgcagcagcaacacaaacatgggaaacaaacacatcggacaaggtggcaagctgtcacaaatgagtttttagcttgctttgtttagcactgaattcatgatattttaaagacatggaaaggacactgaagtagcttccacatttttgtttggctatcctatcattgacattggatgccctttaacaaacataggtattaggtttagggcctactacatcatgttggtcatatcaaaatgaccatgggcctaagcttttatgccaaaatatcaaggctgtctccagaacacaacaagaagccatttcgtaaacaaatattaaggtttcaactttcaattgagaatgatgtcagtgctaatactacagctaatcatatcattccagtcttaaaactaaactgtaggagatataaggttggtccagggattggaaaagggtgaagggaaaaaaagggggggagaggttgcaagttcaaatctccccaattgacatttatagcaaaactaacaaagtaacatttgcctgtaaaaaataaggatagagaacaatattaccttgagggtcgccttcccctttgcagccttggagatgcggctgatattgcttctctgtaaatcaaaacaaaaaaaaaatcaagaaaaagaaaatatatagaattgaagaatgccacttgggaatcccagtatcctcccctccacattccactgcctccaactttacaacaaacaacatcattgctagaatcaaaaaataaaattaagaaaagataaacactaaaaattagtctttcataaaaaaagaaaagggtcccaaaagcaatgaaagccagtaacattcctagacactttccaactttacgttagacaacacaacaacattagtatataccaaaaaacaccagacattaccaacaacaacaataatatcaaccaaatctttttccaccaagttgaaaccgttacataaatcaaataataatgccataatatttaactttgatctctaagtgtgtttgagtgagcatttgcaaaattgattttgcaagattaagtttggttgaaattgatttaaactgaattgagttatgttcaaaaagctaacgcatccccatgttcaaaggctccttgccaagcaatagagtaatttataaatgttttaactctaaaacctattcgtaggaaaactctatataaaaaaaatatctattgcaaaagtttgtaaaagttatttactcaaaatcaattacaaacccagaatcaattcctcaacataaaacatattcagtgaatatattcctaaaatcacattagttgtatttcaatgtaactaaagataatttaatgcgaatccaaacacattctaaattcctcttagtgcctgtttgtaattccgttgaaatgaatgcgatgctaattgcttctatgtgttttgccttggaaagtgtgaaatgtctgatgaatgtggttcataccgttattcaaaactcttaagatatgtttggaaaaccgttagaaattccattgcacgctttccaaaacaatttctcaccttcctagacattgaacgtgagagcaagaaaatgttccatatccattcagcgtaactcaaagtttatacaaacatagtcttagtagtttcaaaattttctgagtcaccatcctctaatactcttcttactagaagatcaatagattttctctacacatgaccccaatcataagacgagtttctaccatcaatttcaccaacataatttttctacaatgcaatcattcttgacaaataaacaatacaaaaagtgggggcaaaaaaaagagagaaaaccctaatattaaaataatagtagtccagaaaatcagagtgtccaaaattgaacctgagataggaacaggtgcaggaacatccttggcagcggctaaaagtaaaccctcgtccttctcagaatccgagaacaacccatcctcactcccaaccctccgattactatcatagaggtgcacctcctcatcccccgccgccgcctcctccgccaccgccaccggagtctccgccgccgtggacgacggagaatcgagaatattataaacctccctgtcaaaatacccaggcaatttcctctccctcctcaaatcgttcctcatgagccaaaacgactccgtttcgtccctcacctgcgactcccactccttgatttttttgtaatctccggcgaggttgctccaccgcttccggcactgtaccggttcccggttcacgccgtgcttcttgcagtacgacgacaccaacgcccatttcggttcgctcgaaccaaacgccgaaccgctcccccgacccggcctgaaccggctttccgcgtcgctctttccctgaatcagcaccagaatctcctgtcgcgtccaccgcggcagcctcgccgccgtcctcccgtcctcgccgccgtatgcggcggagcacggcgtcgcgccgttaccggcgccatcgacggcgttgggattcgaaggctggtccagagccatgggaaagagaattgacaaaaacacgtgactcgcacgtgagggtttgtgacggtgcctttgggaatgccagttacggcgttaagaaaaagagagggttaggtttattgtgtttttctctcccaagaatgaagagagggagagaaagaaagagttgtggcttttgatagtgaaattggggttttgtttttaatttttttactactacactaaacaaacttttgacccttaactccttaataagggttttttaattaatttttttaataataattattaattactatttattggggtcatatccttatctttaattctcaattaatgagattttctttgtttgcaaaggttacttgttgggttggtttgacatcaaattcctcaaacagcactttcatttcgctgtccatccttttagtaattttctaattcctgtttttggtcattttctaaagggtatgagatgtgaaataatggttatggtggatttcccttcctgtttgggggttctatatacgtgtacaataccactttcaacctcttgatgttactatgggcaattgcaaatttaccacatcccataatacccttgttttttatttattaagattttagagattttgatgaaggcttgaaaatcttccatcaatcaaaggggaataataccgaatccccttttaaatagtagttattcattgatatattcacagaaaagcattagtctatggcaatgtatgatgtgtggaccatgagttgacaagggcatgctaccctaccactcagtaatcctttccttcctttctcaacctcccttatcttatcgaataatttccctctaatctttgcttaatgcttaatgtttgtgcttatggatggccccctccaataaagccactttcttctttttctttgtttgcactttgacataaccttgagggcccatgaatagctactgttagggtttcttttaatcctatttatattccccttgtaaaccgagtgacttgtaacgagtggcggtgaggagattatagtacagacaagctggacgtagcctacattggatgaaccagggtaaaatactgtgtcatatttctcttccctattctcttttctgttttatcgatttgtgtgtgattgtcgatttccaacagattaaggtagctgcactgataggcactactctcacactttggagtaaatcaaatataatttatcacccacctattacgtaaggtgcaatatatatattaaaagaaaatcattgtttattacctagcagaaaaaaattattactttttcttatgataatactggtcatttatagatcgaatgattatagattttgataaaaattaatttggccaaaatatattctaagtatctccaaaatatgattttttctagttttagtctgtaaaaaaatgttacttttaaaatttttaacattttcttgcagtaatttttttgacattttcttagtgttctttttaatccttattattaattatagttaatgtaatattcacatggctaacgaaataaaaaaatgttaattgacataattaaggtaacaaataatatttttaaattaagataattgcattattttaagttatgtaattcaattaagtaacgtatttattattttatataaataagataattacatataatttattttaaattttaataattaagaacaatgacttttattgtttttaacattgttcttgtttttcgattcactaaattgctttttaacagctaacttgtaaaaaatatatataatttacttaatgcgtttacaatacataattttttaaattgattatttatcttaatttcgtagttcctataatattacaaagattttagagcatttaatataagtgtttaacttaattttccttatttttatgcaaattcttttatttgaaaatacatttttatcaataaaatttgtttagcagcatcatttttgtaaacagcaatacttgtaaaacaaacaaccccaacaatgatccaataatccattttgtgaagtgatgtttcttatttttaagtaactcgcataagcaatcgtattatataaactttttttggtttagaatttattttaatatattacttttgaaattacttatacattttcaattcattaattttgactgtttgtaatatgatttatttttctaatatttcacaaacaattattgtgtgtcccaaaacatatattgtacttttctatcattttttactctatcattttttattttattttatttattatttttaaaaaatagagggagatggaatgcctctctttcccagtaataataataataataataataataataataataataataataataataataataataataataaattccttttgaaaaaataatactacacatagggtggttatcccttgaatctgtacacaacataggagtggctattgacttgcatcccattttttgcttttcacacctccaaaattttcaatacccccgcttatccttctcctctctcccctcgctcatcctctccagcatggacatcaccactcctttctcgtgttaggccacaacctcgtgcttctcattttcaatttgtgttctggattactcaatctaaaatggttatctggtttaggatcctgataaagactctctccaagtttccgatgaccttctccaacaaattgacaaaggggggaggtggaagaaaagaaggagaatgaggttgcttgggtggcacataaggaagaagaggtgctaaggttgtgggggcatttttgtccattcaaatctttttactttcttatggagtatggaggacagaagaagaaaatagggtgtaggaagcagtagtccataggagtgatcttactggaccataggccattgaaataatatggtctgcgtggtattagtaagttttcttatttgaattttgtgggtaaatataacgtgattgaaaagaaaaaatatcattaaagataatctccacaacaataatcatcaacaaaatcaataattttatgcccaggccttgtgtgaaaaaggacacggacggaaagcaccaaatagaaaaggaaaaattacgttgaacatctgaatttttaatttctttttaatttctccaaattgatagaattatggaaaagttgattttttttgttttgttttaacattaaaaaaaaaactttgactaattcaaaattcaattacaagataaataaaatttaactgagaatcattttcatgattcaatcttaatttcgataccctaaacacttgtgccgaatcatttaatttgaaagttgatttttgtaattaaataacaaacattcctttattttttaattaagcttaaaaatctactttttattcacatatgttacgcaatttttatctctcaaataattttattacatatttaattagtaatgtttccaaaatttaataatatgccgtttacaagtgtgtatgtgtaatttcccagaaattggtatgtctctcggaaagtccacgtcctagtcattaaaaaatactaatagccaacccatgaacatcttatgtaatatgttacgcaattttaatctctcaagtaatcttataacatatttaattagcaatgtttccaaaatttaataatctgccgtttacaagtgtgtatgtgtaatttcccggaaattggtatgtctcttggaaagtccacgtcctggtcattaaaaaataccaataaccaacccatgaacattttatgtaattgaccatctattccccaaattcagtttcagaggccaggaagagagggagcaagttcgagtactcatcactggttttggaaagcaaatcttaaacaagaaactttgagatattcaaagagagcactcttcggtaatttcattttttctcttcgattttctctaatgaaaattactggttcatgattgcaataacacttgtaatagctgagattttctttcaattgtttttattttattttactttatttatctaattttgcatctgataatcgttggatactcgctaagtagtttggaaatcaaagttatttggtgctgtgaatggttttaactgtttaaatgaaatttaatttaattaactccttacagatacaatttcgtttcatttatttcttgaaaagtatagaggaatttattaatagagttgtaataataaagcttaactatctcaagaatcctatcttgggacaacttccacacaaaaaagaacatttttagagatgcttttcatccacatcttttcgaagaactcctcattcaccctcaaaatttttaacagcatactgaaagattttgtaattttttgtacaagtttctagtggcaattttaatattccatttatctttatatataggataccgaaattatgaattggaaaaagtagaaagaggaacagtgcattttaacttatacttgaaagataggcacatattaaaatgattttctgtttaggaaataaagaatggatggagcgtgtagtcgtaaaagaaaaagggagggtcgaccgacaagtaaatactggaatgaagctgaaaaaataggaaaagataagtggaagtgcaaccattgtgaagaggagttcgctggaggtgctacaagaattcaagagcatctcactggcgaaggaaataatattagaaaatgtcccaaatatcgtgccaatcaaggacctcacaatgcttcaagcagtccacaagaagcattgaatcaattacaaggtaactaatatgtttaacatttctttcttgattttattgaagtttataaatgatgactgattttttttttatctatatcttttattgtcttgaatgttgaaaaactttaaaccttaaagattaaatttatgattcttcttatttatatagtgtttaattttacatttttatgtaatatatgatttgtcttcatacatatactttgaatttaatgtgcgtgattgaaaagggcaataaaataatttccttttaacagaaaaagatcatatatgtaataagaagactataatgtaattacaacaaaacgatccccacaagaaccttcaaaataagctagcataagaagtcagttactaatactaccgactactagaattccaggggacaatgaagtgattgttgatggttcaattaaccctacaaacagtacacgatcaacagctttattaggaggaacgcattttagttaccattccagtgtgtttcttctcattctttatttttaatttataaaaataaaattattgttattcaaatcatgagatgtggaaagttgtaaactatgttttataataatcaagtctatcataagttaatgaaaacttggtggtttttcaagaactggacttaatctcgatgatagaaatgaaccaatataaatttttatccattattttttactatttttctttgtgtttgattgacaaagagtttgaacatgtttttagatgttatatatatttttagatcctttatttgttttctgtaaaatttgtatgagatgataaaggtgtttttggttaaagaaaaagtttaaaatttctgaaaatataattcaatccaacttcttttattatttgcttttacaatatgttttccatcaatcataaatatgaaatatttagaattcattattacaaaaaattttatcttattttttgtacttacaaaattgaaatgtatcaaattggaagttaggttccaatatatccaaacctaccacatctctaatgactatgcacatatgcaatctaataggcaattggacgttgtcacttgttaaacagtaaccctatctttatattgaatgaccattcagtcccaaatccttctcctactccctacaatcccctccctttggcggcaaaggtttggttgaaggaccctctagctgtcatggttggtgcagaggatggcggtggcgttgagggtctcggtatgatgcttccacagctaatatttcattattgtacaaaaaaaattgcccaatggatccaaaacgactatagatcccactctaaggctagggcgcgacatttcatttgagaagtccagcaaaatattttattgtcatcgatttgattgctcaccaaatgaactgcgttatcttatttcatgtattcacccaaaataaaatattatttcatacaggccatataaaagctagaagcttcatgggatggaaactcttaagtttttgtttaattttagagacccaagacttcgtccataatcacaatagtctttttcctcagttctcatggcttttccatcaggttccttttccataaactacgaggtcttcatcagcttcagaggcttagacacacgtcatggttttactggccatctccacaaagctcttaatgacaggggaatctacgctttccgtgatgatgaggagcttcagaaaggagaggaaataacaccagcaattgtgaaggcaattcaagagtccaagattgccatcattgtgctctctgaaaactatgctgcttcttcattttgtttagatgaacttgtaactatccttgagtgcgcaaagaggaaggatctgttcattttgccagttttttataaattggaaccgactgatgtgcgccatcagaaaggtagttatgtagaggcattggctaagcacggaaaaaggttccagcatagtccccagacccagaggttgaggaaatggatatcggcaatcgatcaagtaacttatttgtctggctatcatttcaatgggtacccttcctcgccaatcttttcatttatttgttttcattccagtaattatttatcacttgcctaatgatattttaatcttaaaatttaaagagatataaaatatttattaaccttggaaaacatacatatcaatacatgatatgagccaggagtttagttttactcacacaagtttctctgattgaacagggaagaatatgaataccagtttattaagaggatagttgatctggtctctagcatgattaatcgtgcttctttacatgtcgaggatttcccagttagactaaactcaccttcagatgcattcagctatgatgtgttcctcagcttcagaagcgtagacacacgtcatagttttactggccatctccacaaagctcttaatgacaggggaatctacgctgtccttgatgatgagaagcttcagaaaggagaggaaatacaaccagcaattgtgaaggcaattcaagagtccaagattgccatcattgtgctctctgaaaactatgctgcttcttcattttgtttagatgaacttgcaactatccttgaatgcgcaaagaggaagggtctgttcattttgccagttttttataatgtggaaccgactgatgtgcgccatcagaaaggtagttatggagaagcattggctgagcacgaaaaaaggttgaagcataatttggagaagttgaagaaatgggagaaggctctgcgtcaagtagctaacttgtctggcttttatgtcaaacatgggtaccccaccttaccaatctttttactttataattttcgttggaccaatttcacctgctcaatgatttgatgttaaaatttaaagacaaaagaaatgtttgttagccatgacaacatatgtatcaatacatggataccaggcttttagtttaacttcgctaaaacgtttttttgtttgaaacagagatggatatgaatatgagtgtattggagagattcttgagtgggtctctagcaggattagttctgctcattacccaggtggactagggtcacaagtgctagaagtaaagaaacttttggattttgtatctgatgagaacatatatggtgttcacattatagggatccacggaattgatggggtagggaaatcaacacttgctcgagaagtttacaataatttgattgctgaccattttgatgcttcgtgttttattgaaaatgttagagaaaaatcaaagaaacatggggtaaaacacctccaaataatacttctttcgaatatacttggagtgaaggatgtcaacttaacaagtgtgcaacaaggaatttcaatgatacaacgtaggctccagcgaaagaaggttcttttgattctagatgatgttgacaaagacgagcaattacaagcagttgttggaaaaccagattggtttggtcctggcagcagagtcataatcacgacgcaggacaaacaactgctagcatctcatcacattaatcgaacatatgaggtgaaggaattgaacaggaacgagtctcttctattgcttacatggaaagcttttaaaacagaatactatgatccaaggtatgagcagctcttgaatcgtgttgtagattatgcttttggccttccgttggccttggaaataataggttccaacttgtttggaaaaagtgtagaagaatgggtgaatgctatccatcaacatgaaaaaagtcatgataatccaatccaagtgatatttaaagcaagctttgatgctttggaggaaaaagaaaggagtgtttttcttgacatcgcttgttgcttcaaaggatatgaagtggcagaggttcaaaatatacttcatgctcattatggtgaatgcgtgaaagatcatattgacgtattggttgacaaatctctagtaaaacttagttatgctacaaagccttgttataatagagttacattgcatgacttgattgaggacatgggtaaagaaattgaccgccaggaatcactgacaaagccaggtgagcgcagaagattatggttaccggaggatataagagaagttttgggaaacgataaggtgagtgaaactcatgaatggtttagtttcgtttcttatctttatttatcttttctggctatcatattttcacatcatagttgttctttttttcttttataatagttttctctaaatatatgcattgaagtcttttagatatacttgtattgtggttgattcatgccttttgcattaacagggaactaacaaaattgaaatcatatgtttggatttacccatatttgatgaagaagtagtcgaatgggatggaaaggccttccggaatatgcaaaacctcaaaacacttattattaaaaatggtaatttttcccaaggtccggaatatcttcctaatagtttgagagtacttgaatggtggagatatccgtcacattgtttaccatctgattttcatccaaaggaccttgtcatatgcaagttacccgacagtcatatttcaaaagttgagttgactgacttattgaaggcaagtttaatagtaagtacatttttctcatcttgtaaattaattaatttacttttaaaaatattcatttgattttttttttctttttctttgcagaagcacgtgaatctaagagttttgaatttttcaagggcaactgtttaacaaagatatctgacatgtctggtttttaccaatttggagaaactttcatttcgttaaacctgtaaaacttttttaattactttttagttgttattgctgtaattatgtttctttgtctcagtaataatgctcagctaagtagatataggtttagtttaattttggacatatttgtactccaaaagatagtaggtgcattaactttttgctgactgcatgtatgggtattaaggcggactgtcatttctcttgtattttcccataagtatgaatgaaaccatagagaacagaatggacattcagtaaaaacgaaatttagtctgttctcccattttcttgtttctctgttaatggcttttatgttttatggttctgttgcaattgcatgttgttctaacacatttgaatattgtcagaatttaattacagttcacaatttgattggttttctagataaactttaaaatattgagcttttggttgcaccaagcttagaagttctcctcccattaagttgatctctcttgaaaactttcatgttgttatagtcttgagagtgtattccagtaggaaagagagaaaacacaaggaaacttcatttgcaatacattctcataaaataaatgtcattttcatttcaaaattttattggacttcaaaaattatgcatgtttgacagtggaatttttcagttactaagtagcaatacaactgactcttcttcacgtttcatgacggaaggggtgtggcaatggctaaaacaggaagatggtgaagaaaaaaagtgggttcaacagtaccttcaaaaggtagaatggctttgagcatcaagatgcaacttgtgatgaattttttcaataggtttcacgcggtttcctcatgtgagccagtggaggcaattttttttaagatcatggcttgccttttctcactttatagcaggagcacatgtatctcttagttcaccaagaaacaacataaatttcttctttctgatataatattagctaaatgttaataaataatatttttactccaaatttaagaagctctagacaagaaaagctgattttgaaattcactttttaatttaagaagagatcagccaatatgatatttaccatgcttaaataattgaggtcatattttaagacaaactggaattcgataactcatacatctaaaaacaaccagctatcatgccaccgtcaatccttatcaagaaaatgaagaagtcattcatctgaaagatatttcaattaagagagccatagaagtaaacacagatctattgatataccccaactcaagagtgaattaccatcatagttaagcactctgcttacgatataaaagaattttacgcacactaaataaaacgctaaaagaagcagatatagtagtatgataaaacctaagcagttataatttaacggctggcttatgtctttctccttcctgatcaaattgtttatcataacaagcagcctgatcatcctagcaattagtagaaggaaaaagttgaacctgaaaaaaaaaaaaaagtttagggtaatgtaaatgtgtattgactaaaatgttataaatgccttttcccataactactgaaatttcaaagcctatgccaaccaaattataaatgagaaatagacattgcaccagacggcagacgttgcagtgtctctttctcatttatccaattttaaaggagggaaaacaaattatgaatgttccaaacaatcaacaaattgctgtctctaatgattataggagctttattactcagttttgcgtatgctccgaaaatatttttgaacaataaataacattttgttagtacaaaacagaatgagtacagaccgtaatgtacaaaaagtaagatttttgtagtctacaacaatcattttgataaaataattagggatcttaaactctttctcccatagaattccagttcctaacctaacagtttacttttaatgctttgagaaaagaaaagagaagttcacaactcacaaacttcttgcaacaatatttttgtaaatggaaatctcaaattaagttgtagaaaaaggaatcaaaagtcttccaagaaaagaaaactaaatcaagatggcaaaaaaattaaaacactgtttccttcattggagttgaacacacaagactcaccttgcaataccagaattgaagcaagcaaccccctagaagacctatacaaaccaaaatggaattactcttaaccaagaggaaaattaaaccatggaaagcctgttacaaattctcgccaacatctcatttacatgcagtactgtatttgtacaaaaagattgagtcacagttctatcattcattcaatccgtcacttgatgggtaaaaaaaatcccaagtttgcagcaagcaacaacactcattattttaagtttatccagaaaaccaattgagcagtacctgaaatgtaataaaattctcatagtattcaaatgaaagttccttcaaatttgagagaccagatacatcagtccggaacgtgagtaaaacattgcacatacaaaattcaaaacagttagattaatgaacttctgcaaaaagaaaataaagggggaaaaaagaaataagatccaaatgaaaaatcttacagtgaatttattaatttacaagatgaggaaaatatattctttaaacatcccttcaataagcctccaaaattcaatgacctgatggaactattgggcagcttgcatatggctagttctttggttgaaaatcagaggatacctccgcctgccattccagtactctcaaactttcaggtagataatttggaccttgggaaaacttgcaatttctaataataagtattttaaggtttttcatctccttgaaggcgtttccatcccattcgattatttgttcttcatcagataaagggggatccagacatataatttcaatttcaccagttccctgttaatgcaaaagacacagttcaaccacaatacaagtagatgtaagacaacaatccaagtatttagagaagattacaaattgtaaagaacaaaaaaatcaactaggttgagaagatatgatagatgaaaaaagatgaatcaagataagaaaccaaaccattcatgtgtctgactcaccgagttgtcttttaaaacttgaactatatcttttggtaaccataatctcctgcgcttccctggccttttcaatgatttctgccggtcaatttctttacccaagtcctcaatcaagtcatgcattgtaactctatcatcactaatatgtatgagagacttttcaaccaacactgcaatatgatatttcatgcagttatcatagagatgatgaagtatatcttcaacctctgtacattggtaccctttcaagcaacaagcaatgtcaagaaaaacactcttctcttcttcccccaaagcatcaaagcttactttaagtatctctaggatttgattattaggaattctattgtattgtttgatagcagattcccattcttttatactttttccaaacaaatcggaacctattacttccaaagccaatggaaggccagaagcataagttacagcatcttccaagacttccgtgtaacttggatcagctccttctgatttaaaagctttccatgtaagcaattgaagagcatctttcttgttcatttctttcacctcatatgttcttttgacctcatgaaattccagcagttgtttgttccgagtggtgatgatgactctgctgccagaccaaaccaatcaggttttccaacaattgattgtaattgcttgtgctcgtctacatcatctagaatcaagagcaccttctttcgccggagcctattgtgtatcatggaagtaccttgttgctcgctggctaagttgatttccttctttcgaagtatttgtgaaagaagaatgttttgtatgtgttttaacccatgtttgtttgattcttctctcacgttttgaagaaaacacgaaccatcaaaatgatcggtaatcaaattataaacagctcgagcaagtgttgattttcctaccccacctattccgtggatccctatcatgtggacaacatcaacagattccagctctaaaagcttccttattttttcacttgtgaccctagtccaacaggcgaatcggcgagatgaatacttgcttcacggtgattaatctctctgaagatgcgccccacaatcttctcaatacagtcgtgttcatattcagctctgtttcaaacaaacaaaaaaagttgaagttaaactaaaatccttctatggatctcttggcacgtgtgctgtctaggtaaaaaaacagatatttcttttctcaaaaaaatttaagagtcgaaacaaatcattaatccaacaaaatttacagagtaaaagattggtatggtggggttacccattttggtaatcatagccacgcaattcagctacttgatccagagccttcttccatttacgcaacttctccagttaagatccaagctcttctggtcagctttgaaccattcttcatgctgagctaatgcgtctctataacaacctttgttctcgtgtcgccgcacatcagaagttttgacgttataaaataccggataaaccaaccgatcttttcccttaaggcacttaaggatgtaggaaagttcttctaaacaaaatgaggaagaagcatagttttagagagtacagtgatggcaatcctggacttttcaattgccttcataagtgctggcgttatttcctctccattccgaaggtcctcatcgtcaaggaaagcgtagattccactttcacgaagagttttgtggagatagccggtaaaaccatgacgtgtgtctgggcctctgaaactgaggaacacatcgtaggtgaattcatgggaacgcgacgttgcagccattagaagaagaaaaaattgtgtgattatgcttggttgctgggagttgggactctagaaccaaacttaaagatgaaattgattgagcaaagtggtagactgagtacctgcagatatatatttttctgacatagtaccaagcagaaattattatatccacttggtctaacagtgaagagtttacataattaacagaaaattgccttcatttaaacaagacaaaaaagaaaataaataaatagtcgtggaaggtttctcatgctatagtgaataaaactaaaaattcgttggcttaataatttcaaaagtcaaaagtgatgtgcttaactttaaagtgaatttgccaacaaaaaaaactttaaagtgaagaagatagctggtcccactgttagtattattatacaattttttttaatcactattatcatacgaaattatcattcattatcattagatagaaaacgcgaataaaacaaacgcattagtttttcttgaacagcaaaaaagattcttattaaacccagctaagcacaagatgttccaaagctataaacaaacagacccattagtttaattgtgaaaattaagaaatgtccttgcttactttatgtacctattaaataaactgaagaagacacgcattctgcctccactattattattttgttgttaatttgtcatacaaaattgtccgtggatccactgacccaacacgccaatcctaatgatattaagctttcttctcatgactgtgtatgatcatgttcccatgcattattcactttgttaatttgagccgcatgattgttttgggatgatgggtctatggtggaagaaggaaagagaatagaattgaatagtaattttgctagtatttttactatatattttaaaggactaaaataataaaattacaattaaaatatactcatgtgaattttttaaaaagtgttagccaaaagttaaattgcaaacaaaatgggctgaagacccaattccagtagtgctaggcaattatttaacgtattcaattttttacttgatacacctcgaaagtttgtaatgtctcttttttatccttcatcatctttctcaccacctccttcctgaactacactactgtgaccaccaccactcaccccctctttcctcctcatgttgccaccccatcaccacccaaacgcttctcactcaaacatagatttgcacgcccctctttcttttgcatagttcgccaccaaagagagtcttcaagtgaagtgtacgaacatgaatgtgaggagagtctagaaactgagatgagtgaagtgtgcattagtgcggtgttgagttttggtcaagaaaatgaaggttagggaagaaagggtaagtgtggcactgaattatggtaccttcgatctcgttacagattgatcaatctataatacaaatttattatagattgctcaatccataatgtatttttttgtattacagaacactcaattataatacaaaaaaatatacattgcgaattgttcagttcatagtacaaatgcattatgaattgctcaatccataacgtattttttgtattatggattgttcaatctgtaatacaaaaaaatacatcacggatgattcaatttgtagtacaaatgcattacagattgagtaatatgtaatacaaatgcattacagatataacaatccataatgcatttggtgggtgggtgtcgatgatggtgaggcctgggtgggtttcacctgtggctgtgaggagacgacaaaatgaagtcacgcatatgcgatgcacaaatttggtgatgatggtgttgtgtttggtcacatagatgcaagagtaatggtggcccagtgaaggttcatagaggtggtggtggcagagaggaagaagggtagaaagggcatactagaatttttggaggtgcaccaaaaaaaaggggtatgttaagtaatagcgactaattaggaatggtaagtgattatggaccacgtgggtaaaactgaagggataagctttatacacccagaaaaagtctaattcaccattccaatatagtgaattttggttaatgcccctccttataaggttaagtaaggcactattcattttcagcttcgtgcacctggttcgtcttttgctcttctccatcgcacctcgttcctcttctcctcttttccttctccgtcgcagtagattgcgttcgttggtgatgatttttctgtcgtcatggttgctggtgttgctccctgtcttcgtttgctgcctccgttcgctgtgagtgggtcttgattttttccctttaatacggagtggatatcacggattggcagatccgtaaagttcgtaaggattgataatccatatacctcctacggatcactcaatttgtacgacttttttttttaaattattcaatataatgagatttaatttttaattaatggttacataatttattgtttattggttattttacatattctagcccttaagaaagttcatgaaattagattatataattatatgttgtatcatgataatagtagtgatttttggcttgacaaaaatttaatttttttcctatacattctatgaaatagaaatagagaacaaagtaattagaaaaagatataggagctttataatattgttcttgtatagggatcatataaaaaacaagatgttttaaattcatgaagagaaagatattgaaggcttagaccttaggaactattattagctggttgtttgggccttatgaatagaggtacatagtacacctatgtatatatatacatgtagaactgctaagttatcagtgaattactagatactattgagacacgctgatgttttaacttgtgacccacattggttttttttaattataagcacatcatcatcatcaacaacatcatatatggtcactgcctcgtagtgtaatgctggtaactagttatttttacactttaccacttaacgcttatgatggataatgatgaaactcgttggccataggattgtatcatctcaattaaaaaaccttatggactgcaaggtttgttaataatataataaaacactgtccatactccaagtaggacattgatagacggtagattgacatagcttatacctgtcagcatttatatgcacaacatcattgaaggatgaaaacataaagtgtataagtaacaaaaaagttatagttaagttgattacagagttgttatattgacttaaggaaatttatttgttgttcttagatgtatgtcgttaagtttttcaagtttcatgtttattaagtagtttgcttttattttcattgttggttggtttgaagtgtgacacaattaagcaaatggtaccacagattatggttaaaacaataggattgcatcggacattagggcgagatataaacaaagacatttgtgggaatgaagagctagcccctaaatgtcgtaggcctacgacatctgccaaaagacaacaggcaggggtaactgttgatgaggatcctccggctccgaaccaacatgcaggggctactattgatgaggatcctcctgttcaggacctacgtgtggaccatgatattcctgtcatggatgatgcaggtgatgaaatacaatcttttccaggtgggttggaagactgtttagtgttgacagagtatgttaaacatgtggattcaaccatgtgtgtgggaaggacatgcaattatatgtttcattacaaacaaaatgcaattattttccaatgccaatgactgtcattgatgtaatctgtttgcatgaatgtcctgagttaaaattggcgtctcacggaagaaaagttcataaatttggaaggcctgcactcgagattgaaggattagttgttggtacgggcttaggccctttgatttcatgctcagtcgagactggagataggggattgccctcggcttttgtggaaagatggcactctaagaccagcaactttaatttacccgtaggggagttgagtatcactttggatgatgtcgcttccctgttgcatctcccaatcgtaggagctttcttgtcatatgaggtgattgatgttggacaggcagtaacgatgcttgttgaattgcttgatgtatctatagaagaagctggagcagagatggagcaatgccatgggacatatgttcgactgtcttggctgcgagatatatatgctgtgagctgtcagtcgatgaagtggattctagcaaccagagcctacttgcttcatttggtcatgtgcacactctttgccaacacgagggctacacatatccgtttggtattcttggaggcatttcgcgatctggaccaatcagtaggatatgcttggggtgcggctgctctggttctcatgtatgttaatgcttaatgtttgtgcttatggatggccccctccaataaagccactttcttctttttctttgtttgcactttgacataaccttgattaaggtagctgcactgataggcactagtctcacactttggagtaaatcaaatataatttatcagccacctattacgtaaggtgcgataaatatattaaaagaaaatcattgcttattacctagcacaaaaaaattattactttttttttatgataatactggtcatttagatcgaatgattatagattttgataaaaattaatttggcccaaatatattctaagtctctccaaattatgattttgtctagttttggtctgtaaaaaaatgttacttttaaaattttaacattttcttgtagtaatttttttgacattttcttagtgttctttttaatccttattattaattatagttaatttaatattcacatggctaacgaaataaaaaatatgttaattgacataattaaggtaacaaataatatttttaaattaagataattgcattattttaagttatgtaattcaattaagtaatgtatttattattttatataaataagataattacatataatttattttaaattttaataattaagaacaatgacttttattgtttttaatattgttcttgtttttcgattcactaaattgctttttaacagctagcttgtaaaaatatatataatttacttaatgcgtttacaatacataattttttaaattgattatttatcttaatttcgtagttcctataatattacaaagattttagagcatttaatataagtgtttaacttaattttccttatttttatgcaaattcttttatttgaaaatacatttttatcaataaaatttgttaagcagcatcatttttgtaaacagcaatacttgtaaaacaaacaaccccaacaatgctccaataatccattttgttaagtgatgtttcttatttttaagtaactcgcataagcaatcgtattatataaacttttttcggtttaaaatttattttaatatattacttttgaaattacttatacattttcaattcattaattttgactgtttgtaatatgatttatttttctaatatttcacgaacaattattgtgtgtcccaaaagatatattgtacttttctatcattttttattatattttattttatttattatttaaaaaaatagagggagatggaatgcctctctttcccagtaataataataataataataataaattccttttgaaaaaataatactacacatagggtggttatcccttgaatctgtacacaacataggagtggttattgacttgcatcccattttttgctttttacacctccaaaattttcaatacccccgcttatccttctcctctctctcctcgctcaagcatggacatcaccactcctttctcgtgttaggccacaacctcgtgcttctcattttcaatttgtgttctggattactcaatctaaaatggttatctggtttaggatcctgataaagactctctccaagtttccgatggccttctccaacaaattgacaaaggggggaggtggaagaaaagaaggagaatgagggttgcttgggtggcacataaggaagaagaggtgctaaggttgtgggggcatttttgtccattcaaatctttttactttcctatggagtatggaggacagaagaagaaaataggggtgtaggaagcagtagcccataggagtgatcttactggaccataggccattaaaataatgtggtctgcgtggtattagtaagaaagttttcttatttgaattttgtgggtaaatataacgtgattgaaaagaaaaaatatcattaaagataatctccacaaaaataatcatcaacaaaatcaataattttatgcccaggccaattgtgtgaaaaaggacacgaacggaaagcaccaaatagaaaaggaaaaattatgttggatcatctgaatttttaatttctccaaatcgatagaattatggaaaagttgattttttttttgttttaacataaaaaaaagaaactttgactaattcaaaattcaattagaagataaataaaatttgactgagaatcattttcattaataattcaatcctaatttcgataccctaaacacttgtgccgaatcatttaatttgaaagttgatttttgtaattaaataacaaacattcctttattttttaattaaacttaaaaatctactttttattcacatatgttacgcaatttttatctctcaaataattttattacatatttaattagtaatgtttccaaaatttaataatctgccgtttacaagtgtgtatgcgtaatttccgggaaattggtatgtctctcggaaagtccacgtcctagtcattaaaaaatactaatagccaacccatgaacatcttatgtaatatgttacgcaattttaatctctcaagtaattttattacatatttaattagcaatgtttccaaaatttaataatctgtcgtttacaagtgtgtatgtgtaatttcccggaaattggtatgtctctcggaaagtccacgtcctggtcattaaaaaataccaataaccaacccatgaacattttatgtaattgaccatctattccccaaattcagtttcagaggcgaggaagagagggagcaagttcgagtactcatcacaagttttggaaagcaaatcttaaacaagaaactttgagatattcaaagagagcactcttcggtaatttcatttttctctttgattttctctaatgaaaattattggttcatgattgcaataacacttgtaatacctgagattttctttcaattgtttttattttattttactttatttatctaattttgcatctgataatcattggatactcgctaagtagtttggaaatcaaagttatttggtgcttgtgaatggttttaactgcttaaatgacatttaatttaattaactccttgcagatacaatttcgtttcatttatttcttgaaaagtatagagaaatttattaatagagttgtaataataaagcttaaccatctcaagaatcctatttgggacaacttccacacaaaaaagaacatttttagagatgcttttcatccacatcttttcaaagaactcctcattcaccctcaaaatttttaacagcatactgaaagattttgtgattttttggacaagtttctggtggcaattttaatattccatttatctttataggataccaaaattatgaattggaaaaagtagaaagaggaacagtgcattttaacttatacttgaaagataggcacatattaaaatgattttgtgtttaggaaataaagaatggatggagcgtctagtagtaaaagaaaaaggggggtcgaccgaaaagtaaatactggaatgaagctgaaaaaataggaaaagataagtggaagtgcaaccattgtgaagaggagttcgctggaggtgctacaagaattcaagagcatctcactggcgaaggaaataatattagaaaatgtcccaaatatcgtgccaatcaaggacctcacaatgcttcaagcagtccacaagaagcattgaatcaattacaaggtaactaatatactattattgaacatttttgagatagcaatgaaagttgccacctttacttttatataatgctttcttaaactctaaagataaattttcatattttttattctatttaaatgttaaatattttacatttctttcttcattttgttgaagtttataaatgatgactgattttttttatctatatctcttattgtcttgaatgttgaaaaaccttaaaccttaaagattaaatttatgattcttcttatttatatagtgtttaatttacatttttatgtaatatatgatttctcttcatacatatactttacctttaatgtgattgaaaagacaataaaataatttctttttaacagaaaaagatcatatatgtaataagaaggctatcatgtgattacaacaaaacgatccccacaagaaccttcaaaataagctagcataagaagtcagttactaatactaccgactactagaattccaggggacaatgaagtgattgttgattgttcaattaaccctacaaacagtacacaatcaacagctttattaggaggaacgcattctagttaccattccagtgtgtttcttctcattctttacacacgtgctttattttttaatgtcgtttttatgtagtagttccttatgttttatttgtttcttccctcatcaaaaaaaaaaaaaaaaaatcaagtctaacatttcctttgatttctacttcaacttaaaatccctcagaagatgaatttaagttgggagatcagatagtggagcatgattctgctgcatttgaaagcaaggacatagaaagggagtttttttatccaaagggggaccctgatgctgtttgtattagaaagacagatattgagcttttacagcctgagaaatgcattaatgataatatcattgacttttatatcaagtatttgaaaaatgaactcccaactgataaacaggacatgtttcactttttcaattgctttttctttcctaagcttgttgatttaggcaaagataatccatcaattgcttgtgatgctaaagcagcatttcagcgtgtaagcaattggacaagaaaagtgaacctctttgaaaaggattatatcttcattcccataaactatgataatcactggagtttgattgtcatttgtcatcttgctgaagtgatgaaatcccacagagatgaagaaattaaggaatctcccaaagaaccttgcatcttgcacatggattcccgaaaaggaattcatgaagatctccgctatgttttccaaagttatctatgtgaagaatggaaagagaggcacaacaacaatgtgagggatgatgtttctaaatttttacatcttccattcgtgacacttgatgagctgcctcagcaacaaaatgcatacgattgtggcatctttttgctccactatgtggaatggtttctgaaaatggctccaatcgactttaacttttccatgataaccatgttcagttgtttgttccctcaacctgatgcttctctgaaacgatctcacatacagacactattaagaggtatgaatctggttacttaccaacaggttgatggatgaagtaatcggaatgacaaatgattacggttgcggaaaccggataaagtcgggaacgttttgttcatttcctgctctgtatactcgtgttttttttttatttcttaggtgacaaaacaaagtttgatttttattttaaaatcctcaattttatagtttgtgtatgtgagagaaagatttgtcctgacaattgtgaaactttccttaattgttagcgttactataagtactctatcatctttaagatattaagttggtattagtagtattatggcctgtttggatacaaggttagaagtacttttgggagcttctctactggaaatatagtgtttttttcggtagagaagctctcaaaagtacttctagccttgtattcaaacaggccctttgacatattttttattgattttctgttagaagtttgaaaatggtgactatattttgttttatctaatatctcttgttgcattgaagcgcttgaaggagacaacaaaatgattgttggtggttcagttaaccctcaaaacaatacacaattgtcagctttatcaggaggtacgcattctagttgtcatttcaatgtgttcttatatcttattcaccaaccctcaccaattccattatgttattttccttcttcacacggatgcgctttttattttatttttttatttaggtgatacaacatatatggatttgttttcaattctcaataatcaatttttaatttagcctgatatgaaaaagtaaatttattacattccaatatatattggtgctataaagcactttcatatatgattagttacatttttttttaacttagattccaccttcattgaaaaaagtttaaacacatgaaaaattaattatttcagttagattaatccctctcactttttaaatatattctttatttgggtaaaataaatcctttttgttatgtgtgtgtttcaaattctttttaatttaatctatttctcaataaattattttgatgtagaagattaaaaaatgtagcataaccaaaacaatgaaacaggtgatgtagaagatcatgttgtgagcggaggtagcaatgctaatgatgcttttactataaataagttgttatcttatctaacaagcaaagaagatgagactgatagacaattacagtggctggagttccaaggcaaaaagcgcaagagacaagaagttgacgattggttggataaactaaaggacttgaaaaaaatagctattgatgtgaagaactcactacatcagtctggctcgactaacgaattgcccaagccttataaattgaatgctgagttgcaagatttattgtttatggagaagccttgggggcggttaggtgaaaatgttaaaaagatgtggaatcttctggaggatgaagaagttttcattattggcatagatggaatggggggagttggaaaacattcctagcaactcatatcaagaatgagattaaaagaaatgggactttcaaggatgtcttctgggtcactatttcccatgatttcaccattttcaaattgcaacatcacattgcagaaacaatacaggttaagctttacggagatgagatgactagagcaacaattttgacatcggagttggagaaaagagaaaaaacactacttattttggatgatgtttgggaatatattgatctgcaaaaggtggggattcctcttaaagtgaatggcattaaattgattatcacaactcgtttgaaacatgtgtgtcgacagatggattgcctaccttataataccataacaatgcaccctctctctcatgtagaaggagaagcttgggagttatttttgctaaaacttggacaccgtggaacacctgcaagagtttcttgtgaagtactagagtatgcaagatctattgtaatgaaatgtgatggtttaccatttggaatcagtgtgatggctcgaaacatgaaagggaaaaatgacatccattggtggagacatgcattgaataaacttgacaaattcgaaatcggaaaagaggtcttaagcatactcaaatgtagctatgacaatttaattgaaaaggacgttaaaaaatgtttcttacattgtgcactgtttcctaatgatattagcaaagagctatgggttatgatgcttcttcagagtgggttgttaaatggaaagaggagtttgcaggaaataaatgatgagggacgtgtcatagtggataaactcataaaccattctttattgttgttggatgatgggaaattacgaatgaatggtctggtgaggaacatggcgtgccatatcttgaatgagaatcaaacttacatgataaaatgtaatgaaaatttgacaaagatacctcacatgagggaatggacagctgatttggagggagtttctttggcgagtaacaatatggaagaaatcgcagagggcacatcacctaattgtccacacttgtccatcttcatcttatcttgcaattccatcagtcatattccagagtgttttttcacacacatgaattctctaacactacttgatttatcatataatgatgaattaacatatttgccaaagtcgctatctaagttgaggtctcttacttctttagtgctccgtaaatgttgtaaattgatatatatacctccactgggagatctacaagcattgtcaagattggacatttcatgttgtgattcgatcctccaagtaccggaaggcttgcaaaatctaataaacttgaaatggcttgatctgttccaaaataagaattcaatgatgaaattgataccaggatacatactgcccggtttgactaatatgcaatatctggatcttcgcagtgtgtcaggtataaaagtagaagatgtaaaagggatgactatgcttgaatgttttgcaggaagctttctcgatcaggataactacaatcgttatgtgcaagaaatccaggacagtggttatggacctcaattctatattatctattttggaaaatttaagaatgcgacgcctgatttttttaaggattctatttatgttgaattcaagcgtcgaagtgtatggtttggagattgcaatggattgccctattcactgccaagagatctttcgaaattatctgtaattggcaataatcaatgggaatgcttatgtgctgctctgtcatctaatggttctctatctttagaggacattaacattcgaaagtgcaaaaaattggagagtttattctgtgtatcttgttccttgtgcactaatatccaaaacctcaaatctttgtatctttattatttggatagtttaagtgtcatttgcaaggaagatgttgctggtagaggggtgttttctcatctcaaggaatttcgtgtcgagagatgccataaaatagagacgttgctgacgccagggttagttacacaacttcaaaacctgcagtctatatctgtaactgactgtgctttaatgaaggagatatttgcaggagatagtccacaacttcaaaacctacagtctatatctgtaagtttatgtgattcaatggagaagatatttgcaggagatagtccacaacttcaaaacctgcagtctatatctgtaagtgtctgtgcttcaatgaaggagatatttgcaggagatagtccacaacttcaaaacctgcagtctatatttgtaagtaggtgtgcttcaatggagaagatatttgcaggagatagtccacaacttcaaaacctgcagtctatatctataattggctgtgcttcaatgaaggagatatttgcaggagatagtccacaacttcaaaacctgcagtctatatttgtaagtagctgtgcttcaatggagaagatatttgcaggagatagtccacaacttcaaaacctgcagtctatagatgtaagcttctgtgcttcaatgaaggagatatttgtaggagatagtccacaacttcaaaacctgcagtctatatctgtaagtgtctgtgattcaatgaaggagatatttgcaggagatagtccacaacttcaaaacctgcagtctatatatgtaagtggttgtgcttcaatgaaggagatatttgcaggagatagtccacaacttcaaaacctgcagtctatatgtgtaaatgactgtgcttcaatgaagaagatatttgcgggagatagtccacaacttcaaaacctgcagtctatatttgtaagtttctgtgcttcaatgaaggagatatttgcaggagatagtccacaacttcaaaacctacagtctatatctgtaattttctgtgatttaatggagaagatatttgcaggacatagtcccgaaaacattgcacttcccaagttaaccaaattgaaactgcagaatttaccaaaattagagacagtgtgcaaagaaattttaatctgtaactttgaggatatattggacatctccaattgtcccaattatgaaaaacccagaattcgtgtgtatgattgattctgttgattcagattatgttacttattttatgtcgcttagcctttgtattcataattcttgtaaagacaaaacaaaatcataatttactttttgaaatagtatacttgcttttgttggtactagtcataatcgtttcggggaagaatgtatttctacgcatttcaatgtcggataaaaaaaatgttgttttgtcaagtagatgaccattctttgaaatgaaaaaaaaaaattaatattaatatatttaatcaaccaaagtgttacgaagccttttgaaacattcatgcatagttgacacgttgggaatactacatataatggaggaaggtttgacaagatccaacacctccctctccgatctccactgctcttattcgacaacaatatatatattctccgtcatctcttcatccttcattgagtaacattagcatttgttgatgcacaaaactcagcatctccatcataacagcagaaataataatttagatctttcattgcctactggaaagatatatttcaattatcataacattgactcattccctcgttaatttactcattttaccattacctatttataggctaacatttccgttggggtaagtaaggttatagacagtttaaaagggagattagaaagtgggttggggacataattttatagtctttagatcatgtggggatcctgcacattggtgcggtgcttttttgtagcttctcgatcacatgctttggtctgtttgcatggctcactacctctggttagttttatttattgttgcacataggcgataaatattgcataagcagggatttctttcttgtactttctttcggtacctctggtacctttataatactcattttatacaccctgcatcaaactacattacacaaatcctgcattttgtaagaaatcttattttctgaaattctttgagaggcattcaatcaattttcctgcattccatcttcccccgcgatatagtgcaaatgctatctccacagcacacattgaggagtgtatctcgtttgacaatgacacaataacacccaacctgccttacgaaatcttgggccactacagaaatgcaaatactactaattccacataccactgtaccaaacaagtctataaatattgaaatgtttcaaccctgactgccacattcaagggcaatggtgcctgctacgtacacaatatcaaattaagctttatcttctctttttgaaacacaaacaactatgacacgtataaatttaagacaaccttttatacataatgtagtttagtacacttggggaagagtcatagcaagggttactttcacctaataaagcatccacttagagttaattggaaaagacatgtataaatttagtttagtgcacccttttgtaatccttggttctgctctaatttgtcagcttttctttccataaattattacttttctctcattcatctgctgacagtgctatctatgaccctttctacttggtgcatcttcccatgaccttcatgcaccgtagcccagccataacaactaacaatgcatttattgtttttggggtgagtttcaattccaatcaatgcgaccaatgttttccaacgcaaagaagttcttattagaacaaacatgaacaaaaaatcctataatctccaatgagaggtttgcaaagccagcgacgaatgttggcgtgtcctcaactgttgtactcaattatgaaaaaaagaaaattttagagttacaagaactctgtcatatacagaagaagaaaaaaaagttacaagccttacttgtgttacctagcacttctataatcaatgtcagccgcaccaccatttgtaattttgtatcatgaatctgcgtaactctgtattatgttataactaaataattagtgtgctcagttggaattacccactccttgactcgcccaactcgcaaacccaaattgccacccgtagtaattcacacaacgggatacacaagcaccctcattaaattcaaacaatcacatttagcaggagatacaaacatttggattcaatcaatttccaaggggaggtagctaaaatccaatatctaaactttagctacactatcgaatgcctaaaactatcaacaaataccagaggttccattcgaatatcaaaaaaaaaaaaaaactagagaaattcaatcacctctcctaagtactacccctagtggttataatttagagattacttccaattgttaatacaaaataacttccgacatcatccctaaaattgatgaggtcaagacacagcttcattttcaagaagcttgtggtgttatgttgtaaaaaaattccaaagcttcttccctattgaagcttcaccgggttgcaggtaatcttcgtcgtcctcattgtcaactccaccagtagcatcttccccatgggattcactcctatactcagcatcattctcctccgcatcatctgtttttccgttcacctcctcactcaaggccatattgttgacaaaggtccccatggtatcaccaccataaccgtcccttttctccgcaccttaattgttagcattactataagtactctatcatctttaagatattaagttggtattagtagtattagtatgttactatttgacatatttcttattgattttctgttgaagtttgaaaatggtgactatattttgttttatctaatatctcttgttgcattgaagcgcttgaaggagacaacaaaatgattgttggtggttcagttaaccctcaaaacaatacacaattgtcagctttatcaggaggtacgcattctagttgccatttcaatatgttcttatatcttattcaccaaccctcaccaattccatcatgttcttttccttcttcacacggatgcgcttttttattttatttaggtgatacaacatatatagatttgtttttatttctcaataatcaatttttttatttcacacaagaaagctatttgtgcttaacattcctctaaatattaaactaagttcaatttttatttcttaccattagcgtgacatgaaaaaaataaatttattacattccaatatatatttttcatatatgaaacaggtgatgtagaagctgtgaacctgtgaacggatgtagcaatgatgatgatgctttgactataaatgagttgctgtccgatctaacaaggaaagaagaagagactgatagacaattacagtggctggattttcagggaaaaaaagagcaagagacaagttgaggattggttggataaactaaaggacatgaaaaaagagctattgatgcaaaaaactcactgcatgtgtttggcttgactaatgaattgcaattgaaatacaggatagtggtcatggacctcactcctattttatccattttggaatatttagcagcttgatgaatgaggagcgtcttatatatgttgaattgtatcatggtgaattcacacctagaagtgtcaggtttggagattgcgatgatgaattgccctattcactactaagagaccttctggaattatctgtaactgacaatcatcaatgggaatgcttttgtgctgctgtgtcatctaatggttctctatctttaaaggacattatcattggaaattgcacaaaattgaagagtttattctgtgtatcttgttccatatgcactaatatccaaaacctcaaatctttgtttctttttggcttgccaagtttaagtgtcatctgcaaggaagatgttgctggtttaacacaatctttatcttggagggggatgttttctcttctcaaggaatttcgtattaggggatgccatcgaatagagaagttgctgacgccagggttagtgccacaacttcaaaacctggagtctatatctgtaagttgatgtgagtcaatgaaggagatatttgcaggagatagttctgacaacattgcacttcccaagttaaccaaattgcaactactccattcaccagaattaaagacagtgtgcaaaggaattttagtatgtaactatgaggatatattggacatcttcgactgtcccaattatgaaaaacccagaattcgtgtgtatgattgattctgttgattcagattatggtacttattttatatagcttagtctttgtattcataattctttgtaaagacaaaacaaaatcataatttactttttgaaatagtatactggcttttattggtaccagtcattattgtttcggggaagaatgtatttctgggcattgcaatttcggattaaaaacatgttgtcttgacaaatagatgaccattcgttgaaatgaaaaacaaaaaaagaaattgatattaatatatttgatcaaccaaagtgttatgcagtccccactgctcttattcgacaacaaaaacagtggcatgattgagagcacaaaactcagcatctccatcataacagcataaataatactatagatctttcattaatattgcctaatggaaagatatatttcaattatcataacattggctcattccctcgttaatttactcattttaatcaccattacctatttataggctaacatttccgttccatgattgagagcagctaggtgcaagcctctgatctataaagtgctgactgatacatatagttgaaaatttccaaacccaagaattgatacttcatacatgatatcatatacagctagaactagataattaaactttaatattataagtcacaaaaatcttggttagagtaaatattctccaaacactagaggtaaccagagttccaaacttagtatgcaaaataaaaccttgcagtataataaaaatatacaaatattatagaaataaggataacttgtaacttttgttcctaaaagtgtagtacaatatcaatttaattcttaaaaaagcaaattttataattagtctttaaatatctaaaaagtgcaataaatacatcatgttttatatttattgtcaaactgattttaaatattataaattaatgtcaaattgatcatctaaaaatacatttaatattaaattatgtttttagatattttaacttaataataaaatgataaaaaaatttaacatcaggacatattgttgcattttcctgaagttcgttggctgccaccagaagctgattacatcaaatgcaacatatggaggcagctatatttaaagaagataactcttttggtgttggcatctgcatcggagatgagcatggcacatttctgaaggcaaaaacatctttgttcctatcaccagctgaagcggagagcatggctttattacaagcaatattcaatgggtatctcagttggcttatcaaaaggttattttcgaaagcgattgtaagatggttgttgactacaccaatcatgtttctactgctatatcttgcttgcatgttcttctacaaaatgtagcatatttttttattagggcttcaccattttatacttgtaactgagtctttgactatgttcccttcttttattccatctttgattctgaatgatatatcataaatgtattttccattaaaaaaacacgagtctaattaaataacctataatatctacaactaaataacaaaattacatattttgctttcgataaaataaagaaaaagtcccacaacacactttgtaccccccaatttaacgaatttattagcataatcagatgggtcaaattaaaacaactataatatctacatttaacaaaattacatattatgcttttgaattggaaaaaaaaatctcacacagttcgtagtttgtaccccacaaattatgacaaagatcggtcttgctaattaattaatgtctttaggtatttattggttgaaaaattttaaaaaaatttattgtattaattataggaaaatgtaaaagattttgggcaacaataatttttaatttcctaataaaaatatttttactttaaatttttaaccaaaaatatttttttataggcaaaacaaaatcatatatatatataaggaatatcctatagtttagaaaagccagctatgttcccatccaatctgtcctcatataaggttacaccatatttaagtaaaaacaaccatccaaatattatgtttgacgacacgaggaggaattccatcaattaaaaagataaaacttgattaaagccaagtcatctagctttcacatagataatggccctttaaaaaaatattatcaactactatattcataattgaaaagtggattaagtagtcttctagaatagtttttgtaacaccccatgtgcacccggtgtattaacattatacaatatcagagtaacgcagcaagcatggaaataacagtaaaggaagcataaatccaatataatatacatactttttacatatatggtgaattaactgtcatatacaagtatttcagtctccagctatacaactgcctaggcctcaaaatacagacaaaatgaacaaaatctgagctcacaagctcaatcatctaagcctagggtgatcttcacactatcccagtgcagacctcttgccttgggatctctcagtgacctcggttccagctcctgcaacatgagccccaaacaggggtgagataattatctcagtaaactcagggttctcagaggtttccctccccctggttcacttcccaatataacaatgaatatatatatatatatatatcacataattaaacagaattttcatcagttaaacagccttctcggctgaccagaatttgccacatgcaaataacagcacaatgcaagcatatacataatcaacacacattgcctgaataggatcatccactgaagggcacatctattcaggaattcacactgagtacttgaataggatcatccactgaaggacaaatctattcaggactcgctcctcacatgcccaggtaggatcatctactgaaaggcacatctacccaggacttgccgcccaatacctgaataggatcatctacttaaaggcacatctactcaggatttacatggacgcctatggattatcccaggggagatcatccacttaagggcacattcccaaggggtccatagtacctcatactactggccagtagatttcaagcaatcacatcacaatcagctcataacataatccatgcaataatacactatactagtgtaagcacattatcataataagcaacataatgtatactttctcagtgtaatcaaatcacacacacaccctatctcagggttgagctagcactcaattgccagaaatcatcaaaccatcttatcaatattcaatacatattcagtatcacaacctcatagaacatcagaacacaaaccatatcaagcaattacccatgttgggtgcagtgaaacacaagcagggaaacaatccctgaaaccactgagcttacctggtcgtagctcagaatcagctcccctagtctctgggtgatctctaccagcagtatgcacgtcacaccctacagtaggcatgaatcaaaccatcagaaacgacattcaaccgtttatatggaaggaaacacccttccactcataaccaattcaaagtcctctaacttaaggtttatcttagtccggcttctattaggccatacattgaccctcaagggtctgcctcaatcgcaccaagacctcagagtttctttagaactctgtacaacttaattcagagctgtaccagaatcaagaacccacattagttcaactcagccaaaacacatatataatcacgttttcaccgtggccttatgaataacttttgtaaaggtatttaagttaattcaggccataacacctcttatttagacacacttcctccttcccagagtcaaactcaaacttcatcacaattctagtttcaaggttccatatttctcagaacaacctcctaactatccttttctaaagaacttaagcctaattccagccccataatcaattggttactattcacccaatttcccattccaagaattaaacggttaggacgtgaatttcttacctcaaatcaatagaggaaggctggagaagtctttctcctagctctggcgtccttggaccagcttctttgcccctccagagctcagctctctctctcaagaactcaatggaatggggtttctctctagccaggctgaaattggcccccaagtggttcaattcaagattaaggatgattagaaggtgttttatgggtgtatgatgaaggtatgaagctcctaaggtgcatcaatggtggtctaggctcaaggaggaagagaaacagtgttttggggccaaaatttcgtaaaatggcctttaaatactgggtctgccgacgttcccgcgctaatcgcgccatatatggcactattcgcgtcaaattagcgcaacaaaaagtttcctgggcacttatggcgctaattgcgccattacggcgctaaccgcgccaattgggcgcgtttgtggcgctaatcgcgccaaactgacgctatttgcgccataagaccgcatgaaatggccttctggtgcaatctcacgctactggcgccatatcccatactactggcgccgcatcccacgctgttagcatggaatttttttttttttgaatctaggttattatagttttactactatatgtcactcatgcatgaatcactactacaacaacagttttttatatcgattatttgtctcattcaaagacgatgtaactaacatttttgaaagctaagacttttaacgatgattatttaatcgtctttgtattattaaagcattctaagacagttttatctgaaaatcgatttagaatcagtgttaaatttttttaaggcttttataggttaaaattgtcttagattgtcaccattctaagacggttttgggatcgtcttaaaatcagtgttaaatttttttaaaagccttctaaggcgattttaacctataacattcttaaatcattctaagataactttagtccaaaaccgtcttaaaattagtgttaatttttttttttaaggttctaagatggttatacactagaatcgtcttagattgtcacctttctaagatggtttaaccataaaaccgtcttagaagcctcttttcctaaagtttataattttataaaatgatcacaaatcaaaacacacgtaaatcgcatactataccagaaaaatagtcattattaattgtttctctaaccatcattgttagtacagttaaaacttatttgtcacaaatacaattgttttttgtttcaataacattcatcatcaaacatgttattcaatgatagggcattccactgcatcaaatacatgacaaggtattactgtttgtattatagcataactaccccaccgatgacaaagggttaatgaaagacctagaaaatttgtcttacatattgtgtcatctcactgtgacaaatactgcattcaaaacttaaattaaaattattcactatggcgcattatatttgcctagtcaagttgtccaaccttaatgacaaaatgcaatcaaacctgatatgcatgataaccctgtacattttctatttgatcatggttattttgtagactaatgtcttcaacatcttaatgtttttcagctacatttgtattccttgattcttcattagcttgaatctttttgttcatgtaaatggtccttctcctcagccttatgtatttattcattatgatctgtgatggaagcaaaatgaatttgtcaaacccatgaagaatttgaaggaaagaaaatagcaacacaagcaaaatattgccatgatgaaaattccatatatttgttgccactgaacagcccattctaaggtgaaacaatgagcattaattcaatacaacattttgtgaaattaatttgttagcaacacaggtgatttgcacaaagagcaacatgaggatggatcatagtgccacctggtcaacccaaacagccacactagtgtaccatagaggatcacaagcaaattaaccatgttgatcaagtgcataacaaaaatactattcacaacaaataagaatgaatgacaactttctattaaggtggatgtgtagttatacgaaaatgaataagataagaaatgaggatattcgacgaaaggtagcattgataccggtgtgtgaaaaaaatgaaggaacatagattgaggtgattttgacacgttatgagacgaccactggatgcttccgtaagaacaagagtttgttatcaagagctcaacacaaagagaagtagaggtcgaccaaaacttacctggggaaaggtagttaaataagacctaatggagtgagatatagattggcggacgatatgtcttaggatggagtggaggaaagttacaagcttggtgaagggttaaactcattagtatttctatgtttcagtcgttccttttttttaattcttttccgcttaatttctccctctttctttcacccctcttttattttagcttatttttttctcctcttttgtcttatttccactttttttccctctccctttctctttatttgtcttatttctgatctatcattgggttcatctacaccgaccccaattaacttgggttaaaggtgctattgatgttgatgttgaaaaaaatcattgaactctgtgtagtatatatgggaaacaacctatttttttatgatacatataaaaatattcaattcatcatattttctcctcctttcccagtttttaaatcctctggtagtggaagatgccatcttcctggtcatcattacaaatggagcaactcctatcagcctcctggaacaatgtggccaaattcaccttcacattttgatggagtttgtgcagctcctaatctgccaagattgcatggttttcctaggtcaccatcacatatgatggccactgttttacccataaatggccagcatgtgccttcagctcctttttgggacagaagagatacctatgcaggggaatatcttgggaatatgcaattttctggcaacacagcagcacactgtgttgattttgtttcttataatatctttccacattttgggggaaattgtgttgaccttagaatcctccccaagaatcttggagtcaattttcataaccaaggggacctaatgtttcctagaagaaaccatatgattaaatttgagattcacaaacaacgtaccagaagccgccgaaatgaaggcttgtcaaacttggatgacaagaaacagtatgaacttgatattgaccgcataaagaagggagaagataaccgaacaacactaatgataaagaacattcctaacaagtagcattgtatatactaaattaaatattagccttttgtatttaatttttcatttttggtgatgcaaacagttgtatattcatttggtattaaaagaaaatggtacattttgggttgtgcttttacttttcaagaaattttggagttttcagccaagcctgttagcataggatagatgattcgttaagccagtgatgatatgggaaaaagtcgcaccacaacttgaaactcttgtatgaacttgaagcttaagcaaatttactcttagtctcttagtttgcatttgtcttggctctaaaatgtcttcttttatgatactagctttctgtggaaacttcttttggaagaatcacttttagaaaaatcaattttggtatgtcatcaaagaagttctttaggtttagccttgtaaaattttggttgaagctgtttttgtcaacttcgttgttttcttagattttttttgttagacttggaagtagacaagcttctatttcctgccttttctcaacaatagtaaaatagatcctgatgtcatatgaaaatgattcgattgtggtaaaacatatctttacttgaaagtacttttatgttatattcacatcatagccaaacaaactttagtagggcttgagatttgacaaactgtttcctaattattttttccctttcagctggtggttactgatcagtttagcagaatacataaaaaatctataattttttcttttgctatcatttacttgctttgccaatgttggaattaggatgggcgattggtgaatggctgtgaatataagcacaaaattgaacttgtgattcttttcattggttttaagcatatctgaaacctttgtcatttatcttaaatagttttcgctgaaaatgaagaattctatttcagttctacacttcatttacatcaatttttcttaaacttctcattttcctggactgatttgttatcttgcaggtatacatccaagatgctgttagctgcaattgatgagcgccatagaggaacttataattttgtttatctgccaattgatttcagggcaagtgcttttctctttttaaatacttggagtttatggtccatttgttgtatagagaataactttctagaaaatatttgtactttctctgttttgtgctacagtagaaggaaaaaatgattcgcttcaagaaatggagtgtcattttcctgaacaatttaagaaagtttaagaaaatgcataattttttttgttaaaaatgctctcatctgatttttttctgtaggaaaatatctatgcttgcatgaaaatgtgttccttttattgaacatttccacaatgaaatttatttttaccttagtattcctttctcgcttttgcttaattattcacacggaatcaacattaattgcagaacaaatgtaatgtgggatatgcattcatcaacatgatcaatcctggcttgattataccattctatcaggtatgctatacaaaatgatgatgacaatgaaaatgattgctgttaaacttataatcacataacattcacacgcacgcccacactgtactaatagactaacttatgatgcaattctggcaggtgttcaatgggaagaaatgggagaaattcaacagtgaggaagtggcatcactagcatatgctcgcatacaagggaaagcagctctcattgctcacttccaaaattcaagcttgatgaatgagaataagcattgcagacctatcctcttcaacaccgatggccctaatgccggtgatcaggtataaatttcctctaaaatccatttatcagtgacactgctagtatttttgtctgcttcaagcataatatagaatcttggcaagccatttgaaatttgcacttctcttttagcaagagatgaagctacaaaatgggtactaactttgctaggaacacaggttcctttcccagttggcattaacattcgcaacaaagttggaagagtgagaaacaatattcaggaggataaccagcaaggaagtcttccaaatttttcaaactgtaagctctcatctgatggagatagtcattcattggagtcagactaaggaagccatctctctctcttcttccatgccattaattttagtgggtgctaacctttggaaaccaaatgatctagtcacaataaagctgctaatgcttggagcacataagtaccaacactaaccttaagacgagaaattttctagttcttttggcttttgatgccaaatccaaacatggttgaagtatgagattcaagaggggctgtcagaaattttcacgtgcaagagtactacataaaaaaattacatgcacaggagtttcactttggagagtggagagagaggcttgtaaagtggtttgaggggaacttaattggcaaaaaaattaatatattgtttttttttaaaaattatgaatttggggtacttttaaaaagtatttacagttttatggtagttagttacgcccacacaaaacgcactcagacacgttcccagcaggcgcgacaggtgcttgaacgcgtcgccagaaagcgtgactagtcgcgccccaggaaggcgcgactccctcccctgttgcgccccatataggcgtgacccagcaccctgttgcgcctccaccaggcgcgaccctgcaccccgtttcacccactataaatgcccaaaaatcactatttactttcactttttcaccgttatccagaaagtactccaaattcgtaatttttttttaaaaatataataaattcatttttttgccgaagttaattagtatgtatcaattttatcctttggttcccctcttcctctccatgttttttcttcaggcattttgtcttttgtaaattgttaaattttggagtccatctcatcccaaactcatgaaaattttgatgaactatttatgtgatgtgccgaagccgtttttggtggttcatcattgttaatgtttggtgtgcaagcatactctagtattcaccttttccttgtaaatattacgatttgaataatataattgacgtttctcgtcgtttgagtgtctctactttctattgtcacttgtaaatatataactggatttctaaaccactactacatctccagttatgctacttgaggagactcaatatagaaggtttcatgtcaaatatgatttatcaaaactggcaatttctgattttgacacactattttttgctttaatgacaatcttatatgtaaatagaaaactgatattatccttcaatattttctccaatagacattaacaagtaacagcagaaagcacttgagaatgttttaaaatcaaaatcatgtagaaaaatctctcaaaattaaaaaggaaatgaacaaaatgtccattgccctctttgacccgaagatcctaatgaaccccaattaccataggcttagaaatgtttttttttcttacatgagaaaataagagagaaaccaaagcatagaaatagattgaatgggattaaactttacgccattttaatttgacttatttctcaagtttaacgttcttatttatatatgtccttttttcatataaaaattgatttggttgtttaaagacttgaaaacttatttaagagtttactttatgaatcaacaaactcatttctaaacgaattaataaacttaaatttatttattaatattaagaaattaagaaaatttgagaaattaagatgccttttaagatatgggtatatacttataatattcttgtcaagtgaatgcatatacagcatgttgtattttttatttatttatttcactattggtctctaattttattttttggttttaatttggttttttaagtttaaacttttttacattggtccttgtagtgttttgttaagctaaatttgtcagcctttgtcagattttctttattagctatgtaatgttaatttcagcttacatgataaacgctgtctcacataacatctatcacaatttgtatgtaaaaccaaattgacaaagttaatataattaaggaaagtgaagatcaaactaaaactaaaagaattaagatgataagagacaaaaatatattttagtccttttattttaggttgagaaagaaagagctgaataaaactatatttagaggctatgacatgcttcaataaaaaaatcatatatatgaatacctctatgctacaaatatatttctttgtcttctaattacatcatcttatataaatatgtatttttttttatctctccatatattattggattgagcttattcctttaatgttggcctaggtccattgaggatcctaaaaccgtaaacctaattcacctctttaaatacattagttgagggtgaggtgatagattagaattagagaacatgatatagcatagacagttttgatgcctcaagtgacatttttaagagcacatttgagcaaaccttattctttgcatttgagagatctctagagagagtttggatgaaacactctaggaagtttgattatcatcattattggagaggttaagtgaaccaccaacttggtgtattttgattctctataacccattattgttatagtgaaagtttgattctggattagtgtcccgtggatttttattctttacattgaagaaggtttttccacgttaaacaaattgattgtgtttttctctatttctcttgtctcacatttttgttccgcttccacaatccatctgagggttagatgatagaacccaacatatctgattcgatcccttcatatcatttcttagttactgctaaaattgggtgtctatcaagtgaggaattgtttcgaggggaaaaaaaggaagaagaaagaaaacaacgactttttttacactacctagcttacatatctaaaaggagaataaagagtgtccgtggtcgaaatagatatgtcagactaataggccaaactaggtttgaattgacaagtattggcgtattgctatagacaaaatagcttccaaatagttaataaaaaaatattactaacatatttttaatgtataaatttaattatatttttatttacacataattttaataattaaattcttattattatatttattttcttaatttataataactaaaatcaagtcttttaccttaaatttagtctaataatttttaaaaatataattaagaaatttgacattaatttatacatgttgatagttttattttaaccaatatatgtttataaacaaaaaatatatagtagacataaaaaaatgacattataagtactgtttctgagcatatttttatttaaatattttatgaatttcttttattgatttatataaatcaatattatattaaacttttattgtattctggttaattattaaataaaatttaggtatttcttttattgacttaattgtaataattgaaaatttgtaaggactaaatgctaacagttaacatagaatgatcaaaattacacataaataaaaaaaatacaattcaatctaacacatatagcttttttttatatccattttacaaaataacttaaaacctactatttatttctaaatcggacataaaacttcatttgatactaaaatgttgaaaatatgttaaaaatttgggtaactaatactacaaaatacatccttgataaagggtgagaattttcaagtatacatgattattagtcttataggggaatgcgtcggtttgcctaaatttgtgacattaaatttggatgaaaggtttctaaatttgggtctctcatccgaactaactcagactaaaattaaattgatttgaattgagttattagatttttattaaaataaatataaaaaaaattgattgtgaaagatgaaaaaaaattaaatgaacttggctaaagtcttaatctctaaaaaataatatataaaaatattatgtcatgaccagattagtttggattctcaaaatcaaaatttgacacttgaactgaaaaattagatttgtatttttttataattgaatccaaaccaatgattaaagttaatatgtatttttttgtttgaattcatcaagttgtagaattgatcgggatatgtgatcactcctaattaattagtctcatagttagccaagaatcgaaactcacgagattacctcaaagttctatgaagaagtaaaaaatccaaataaaagaaatgttataggaacacatttttcaacaaaatttttctaggacacacttttgtattagttaaaatttgtcacaattacatataaaaaattaaataacatatcatactcattaaattttaattaataagagaatatttgtttaagagagagtaattgaatgtatatttgtaacatgtctcctactctaattacaatagttaaaaagaaaattgtgtaacaccaacattttttaaaattttggtggtagtgtgagatcttggaagcatgcatgtgagagtgatgttgacataaaatgtataattaaggtgtgaatcggcacatgaaaggacggccatagcatgcgagctagcaaattggaaggtaaaggggagaacaatcctgtcatcacgctcacatgcaaatgcatgcgcacattgcatcatctatatctatataattgttttttttattattttatttttattttaaaaaatttaaaaattttattttattatttttctctcactttttttttttctctaaaaaattgtacattgcaggggttccaaccgctacatttctgtatctcatgcaacttgcccctttgctttgcggctcacatgttatgcaatttggatcaatatcaatcaatcatcactcacgccgacaccttttttatttttcctctttcaaatcttttctttttgtcatcaaacttgttttgctttattcctggatttcttattagtttgatgtgcccttcacaaattcgttcattgaatgttacttgaaaaacatgtaagcaccgtctaatttttgtgcgcgcttacgcgatctgcttccattattttaatttactcataaagcaatatatataggttgtgtctcaactaaagtattaaagtaagatcagcaatcattatttgggatacgattacgagtgaaaagttcacgtactagtttgtgctgattactcactgaagatgtgacccattaagctatagggatgttggttcggtttggatcgatgctagtgttagaatcagaaacgaattgcaccatcatatatagttggatttggattgaaaacgaactgcaccatatacagttataaatccacaacatactggattgtctagcttacttctaatgaaaatgatgtttgtttaacttattcatatttttatttggggtataaaccccctccacatacatatgttaaggatacaattttatataatatttgtgtatatttttctaaaaataagagggagagagagaagtatgaaataaaatacaggtgatagatagaagaaaaaaatattgtgtatatttttgtataagaatttgttgtatgaataatatttatttgttaaagttaaatttacaatttaattgaaatgttaatttttatgaatatttaggtgcatgtttgaataaatattgatagaattgatttggaataaaattgatttttgttaaaattgatttgaaagtaatgtaatttatttttgaatatttttattgtagaatcaaattatgaataaaattaaaattatttcaactcattatacaacttaaaatcaaaatataaaaatatatataattaaactagcattaaataaattacactaaatcttttataatttattatttattttattgtaaaggttagtcattgatgttaatttctttacatactgacacagttgactaagacatggctagccaagtaggtagcgtagcggtatctgtaggttggcaaaggctccccataaagcacccaaatactagccacataacacgcaaaacaacttcatatttgtcagcctctgtcaagtgataagattcaaaccagattttattccaacaacaaaggtcctagaaccttcaccacaatttccaaccctaaaattttgaactaacacaatgcaaattacctacgccaaaatttcatcattagttaaactcttgttctagtaaactgacgtattattttgtgagccgtagaaatcacaaatatatttcaacgatgcaatgttgtttgaggtgatagaattaattataatgatttttctcatgaatatttattataattacatactcgatctaaatttgaactcacacacatgaggttaattactagtaaatatataatatctttttaatttgcttcgggttttcttttgttgcttcggagtaaatatataatatctaacaagtcatgcgtagaaatatgatttagtttgatatataatataactgaggtttttttgtttttgccagcagtaattaaatatatttatatgttaaaaattaacggacatcagaaatgcctataactgaggtatgatatacaattatataaaataatattttgtattttaccacataagatataatatataattacatataatattcataattcattaatcataaatcaagccattaatattgtaatattatataaagcactggttttgttaaaatataaaacaaaattatttgcacatcttttttttaataatttaacttttcatgaatgttttttgtttgatgaaatatttgtctagatctttataaccaaataatctagcgtttaattgatccttttcatttttaattaaaaaacatttattgctcgaagataaatttgtgtattgcctatttgtaagtaaaattttcttgtataaagagacatatttaaaatataatatataaaattatttatgaatatatatatatatatatatatatatatatatatatatatatataacacttaagcttgtcaaatatatatagttggattgataacacatctttttcttctttaagaaaaccacactagctattatattaaccacatttcctcacttgtacttatctctcttttctgttttttttttttccacttactatttgaatgaaagaaacagctgtcacaaaacatggctcagattgttttaggattgatgaaaatgaaatgaatgaatatcgtacatatatataaagataggaattcaatcatgggatgacgctgaaagaagattatattgcatgtgatggaaggacttaagatcatgcgtgaattcaatcagggaagaatgaggacaattaatggtactatatatgcatgcctgcggcgtacaaattaaaacttagggtggtacatgcgtgcctttcatctacgactcaactttgtggattaatattgaaatgaaattaaacttattaatggaattataatggatatagaccagtgaattgaaatgatcaatccttgaaaattgaaagcaaataattcttaagtcacgctgcactattaggagacaaacaattatcaacattcaatgaaatttgattctagctggttgtatatccattgagaaaccacgccagtgtgtgaagattgcattaccaacttaagtctataaatggtgactggtgttgtcaacaaacgtcattgacaaacttctaattatttaaaatttattaaaattgatatggatatatatgtaagggagtgtgtgtcaagtctatatcatgcatatataaatggatatgtatgtaaagatcatatatatcaggtaggcctatggccaaaataaaagtcaatgaaaacactttatttatttattttatttataaaatagaaaatttcacagctatcccaaaatgcacggattattatttatcaaattttgtttttactaaaaacatgctgaaatttttcaaagaaaaaacaccctcaaagactaatcccacacatcaatgaaggtgttgaaaaaatttctaatttattaaaaagaaaaataacctataataattaaagagatgtgtctttcttttagccacttataatcgtgtcactgtcattattctttaaacgttatgaagccacttgttccaaagacaattggtgtagaagaatatggcaagagatatggacttcgtctagcaattgatgagatgtgagagctgtaaaggaatgtgaattatatacatgcatagtactaccgtaaagtgaacattccagttgtaattttccctctttttcacttaaaaatatataaattcctaactacggtaagcttgcactcattcctaatgccgttaacattaagagaggaataaaaaattaaacaggtattttaacaaaataagaagatcgactttactacatgctgagtgtgtatggaaccactttaaataaaaattcaaatgagtcgatcatagttaattatgaaggaaaaaaaagttgaaagagaggaagaaaagaaaaagaaaacttgaattaatatttttgagtaattatgtgttattaatataaaatctttatcaattttattaataattaatttttataaaaactttgattgatattctaaatgaaatattttcttctaatcatatttattttataataaattcgaattcaaaatcttaatttagaatcctccaaacctgacaacttgaattaatatatatatatatatatatatatatatatatatataagaataacagcttaacatttatttttagcttggtttctcagcccttaaatttacatggtataaatgggttatataccagcactgacatgaccacaacaagatcacatttcataacataaagagtatagagcagcaaacgtaaaagtggatccaagaaggctatatggcaagcttccactatcttcacaagcatcagaggagaaagaggagacagtagaagagtttgatgcttataataattatgcatcttggtcttcagaaactgacatgtctgaaatggtttctgctcttgctcaagttatgggaactaccaatcggaacccaaacatgtcacaatcaacctcctttcctttctcaacttccgtggtcaaagatgaacctcaaccatacccatctcaacctcctccagatcaaggtttgctagccatcttaatttattttaatttagcatgttttttttttctttcttttttttgtgtttaccctcagttcatcggagaaaaaagccttgattaattcaaaatttggtcaaagtaagtaaagttgaatattactcaatgattcaattttaattttgacacatttgtatataattacttaattagttattaattagcatgttttaatttccaaaaattgataaaatttgtatgtttttatataatgagaatccctcattgtttggttttctaaaaaagaaacactttaatttctgtatctttaaattccaattaatggaaatggtggatgcgtggatgtcatcgtatacagaatcaatttgttttcgataaaaaaaataaaaacaaaaacataatccattgtttttctgaatttgagatacctcattcttgttgtatactctgatctatcattccttgttaaattcaaacaagtaaaacggtcataaatttatgaaaatgttctagactccaagccacaaacaacgataatctatgatctttattgtcaataaatataaggtaaaatacatgtttattcaaagttactcaaattacactatttttatccccaaaaagttacactgtttttctctcatgaattttgaaaaacattatattttaatgtaaataatttttttatagtattgaataattaggatgagtctttatatatatgactgcttgctagtattattagtagctaattgtaaatataaattattaattttaacttttaagaatatataattttaaattaacaaaacctatcaactttgagattttatttctgcaaaaaatacttttgagattttatcaataaaaatctccgtctcattttctaacatttcaaagttaataattgaagttcaaaatttcctataaataacattgagattcatatagccaaaaattaaccttaaaaatcataactcatttaaataaaaaggaattaataaataagataagtcacataatttcaagtaagaaagaacatgtaacacatttaatttgcctttattttgatccctgcgtctgtatataaatatcacgttatatattggatgatccacatagtaccacgtaaatgatgcacaaaatttatctcatacgaaataatttatatgttgctttatcactttcaggaaagaaaaaataagctattttcataaaagaaatgttttaaaagaattataattaagtcaagctagtcacttttcactgaaataaaatataatttattttgtctctcatcacatcttgtttaggaaaaatcaaaaccaaagaatgccaatatatataagttgcatgaggacaactaggtaaataaataaattcaatgcatgcgtctgtcttttattcaagttgtcgtgacatttcttctttcttcttatctatgcatttctcatctttgaccaatgccgaacatcaaggggagctaaaacatgagaatttcttcacgtaacagaataaaatataaaataagtacttctcctattctccagctgcatacgtcacatatatttttctacataatacaccattttttttttttatatatttacatgcatgctatccctaatctacttatctgttactcccatcggattatttactccctcacattctagttactactctctttttacagtggtaaatgcagtccaataaatgtcctatgatcatttttgtactttgtatgcatgatgcatggtatgtgaatttgggaattattatttatatgttaatctagagtttaatttctcatgccgtgaccatatatatacatatatatatatatatatatataatttttttctgttaattatgtagatcagtagcatagcgaggatatatataagtaaatgtaaggttgtcaaactcattttatttacgtaaaatcatgaaattgtaagagtgtatcagttaagtccaagtttgacgaccatggttttacgcactaggaaaacataaaatctgtacctacctttttttggacaaaaaatctgcaccgatctacctaaaccttgttaactcggtttttacatttacattcgatatgatctcctttattttagtttggacagtagcactttcatttctctatagtcaattacattattataaccactcgtgttttgaaatggatccgttttctggattgcattccccacatttataattgcatgttctgttctcatgagtcagtcttgtagaaataaataataacttaataaatttgactacagactgataggatttgaattcaaataccatgtaaattattcaaaccttcccactactaaggtaatcttaataaactagctgttcttcttaccatgacataaggagttaatacatttttagacactaattaatactatctcatatatcatatattttgttattgtactaatttttaagatgttataccatgatgaccaacaatgactttcaatcaatatttagacaattaaaacagttaaacttagttaaagatcgaatgtgtgagattattataaatctcttaacatttattttcgattcttacgaataaaaattaaataattctacatttagacaagtgtaaaatttacacataaaaataggcttatgtagaaaagcacattaaattgaaagaaccaatctcttattgatttgcatgtgttggtgtagaggtcacaaagaagcaacactacagaggagtgaggcagagaccatgggggaaatgggcagcagaaatccgtgacccaaaaaaagcagccagagtgtggctaggaacctttgaaacagctgaggatgcagcccttgcatatgacaaagcagcactcaagttcaaaggcacaaaagctaagctcaatttccctgaaagagttcatcaagatgttccctatatgcaacaacaccaacaacgttcatcaaacagaaacgtttttcccttccatgcaacttccaccactaatagtgctactgggtctgtttcttctgttgatgttgttgctcctccttcattgtccacacatgatcaacatggccaccaagttttcccaaatctgtatcaatatgcacagattctttcaagtgatgatgcacagttcccttattacacatcccatcttttcaatcaagaacaacaacagcaacaacctttcaattctcaattctctagcactttttcttcaacctcatcctacttctacaaccagcaacaacaacatgatcaacaaggacatgatcactcaaaccactagcaaggtaatattgatctgtgtgatttccaaccgtaacaataaagtttttcaagtcttaattaatttgtaatcacaatgttgtaactgcaatattgatagcatgcatgggcattaattagtcgtccacaattttccttttctcaaaatagtaagatttttgaggtatgtaactgtggcggcaatttaggggcaaagcaattttaaagcttgactagctagttagtatatgcatctgtcaattttgctgtagaatattgagtcagggattaatctgtttctttaagcgtgcacaagacatggatcccacatttaatttccaatttaattatggatatggataactttttgttggaaagtacatcgtgtcatgttttaattattaaattaatttgaatgctttttaattgtttgataatgtttaattaaaagttattaaattattattattattattttcattagattcgttactttgtatttattttttaaactttaaacttctaaattgttgaaaagttatcatcaaaataattggatcaaactggtgtgaaatagaattatctttactttattttatagtaattccatcttactcaaatagtattatctttcagaaagatgtctaaaaaaagaaaaaaaaaaccatttagtgtaaaatcattgaatttagctcagtcacgtttaggtgcatcacaacctatcatttatctctagtaaattcacagtgggtgttttccctctttttgaaagaaaaggtgtggaaagttttggttcgcgttgaacaaaggtctgcaaataccaatactatattacgaagtatgagtcgttcattagacggaactgagtctgtttcgattaattaaaggagcgagaggtggaaaagaagaaaagtagtgagaattgattgaagtatctttttgacctgttccttttgcatgcccccttaatcaattactgtttacgatgagaagaagtacgggagaggacattgaaatagaaattataacaagataaaattttcgtccattgttacacccgtttttcgcaaagcaagtcatgtcgcatgcttcatatagaaagttccatagtgcatatggctttacgtatttggagttccgacgtgccacctaccaacaactttttaatctttttttattattagtgagagatttttttttttttaagttatgttataaagtgtgaaatatttataataggatgagaaagactcaacatgtccacaaatttaatctgacccgaaattcatttggatgagtttgaattttaaaattaaactcaatatatttttcaggccaagtttggattatgcttattaaatccatcccaactcgatttagtgtaccctaaatctttttagaaatatacttttttataattatgtattaataataagcttttacccaataaataatgtttttgcataatatgatattgtatttagaataatattaaaatatcttactttaagtttatatttttattttattttatgatttaactatatttaatattaatattaatattgatatattatgttaaaatgtcggattgaccgatttcatctcatatattttaagtcttgatcagattagttctattttacataaatgatcaatcaaaatttcagatcaagcaagagtaaagataaacttgtcccaattgctcactcccaatcaagtgcatctgatataccacttttgtagtatgatttttggtggtagtcataaatgatggctgtttaagggtagcattatgggttagctttagtgtgagaactcgtagaaacaaaatggtatcattgtcataaagccttgaatcatgttagacataagtaggctttaggtttggccctcaaagaagttagataaggccgtaaaaattattataatatttcccaacttacttccctatatttttattattataatttctatttaattatagaaataactcatacataaatacttacataataaatatttattcaatacgtactagattatttaaccaaagaaatcagtttggttgtgttatgtcacaaacaaccaacacaatgagaaaagagccaaaattaaacaagtttaaagtcgtcatgaatcacttttttcgtttaaaaacaaatgatagcaattaaacattttaaaaattatggtttgtactctagagttcaagatctagagttgtttatgaatggctttacttcaaagtctcgagaaaaagagtgcagtttaatatcctaaaactacccataaaatattttagtgcgtgacaaggaactggtgaacttaaattaaaaaggatgacttgcttctccaaagttgggaataaacagaaaattctagcaaatatgcattcagcaagtggagtacaaataaaatggccactgagaacataattaactcattagttggacctacaagtcttgaagattgcagcaaacttaattaagacatcaggaaataaatcctctcttacgttacatacatagtatacaaggtttcaaaatttatgcttatttctctcaaataaatattgaacaagttgtattcaaaatttgaacacgaccttctcgtattgatacaagtcatttgacttttcatcccaaaaaaaagcttaacattgatcctaaagcatctgatgttttttctatatagatagtcatttcgcataaaggagttattctgcaaaaaattatacaataattgatatgcgtgattaatacaacagcaatatgcccaaggtgtttcctcaaaatacagaaccaaatcattctttaaatggtgcatcaccatgatcactctgcatgtggctctcgtatttatctgccatcataggcagagaagggtgcaactctgagcgcggaaataaaagtttcagacggaaagcatcaactccattcaaatagtagtgaaagagccgcttggccctaataaagccaaggcgaccatacagtgccagtgctcctttatttgtcacttccgcttctaatgtaacctatacaaataaataaccattaagtttggtctctaaagccaaattctaaacaatttaggcttaagctacgagcacaaatttatgctagtcttttcactaaatgaaatgaatcaaaatctttcatggcaccatggtagaaggattgattagttacttcaaaatgaattaatctcctagctagctgttggcactcaataaggaaaaatatgccactccaagagtgcttttaccaaacaaaatgaagatagcagaaaacaagaacaaaactgaagtgttagaggcaaacaaaaatgaggcacagacactatcaaaatcctggtttaattaatgaaggttgtagaatcagaaaatgcagggcacagttccagaacatggacctgttttcactgctatatctgattcaactttagaaacagaagttaaaataaacatctttccatttgcatataggtagaatttagtaaacctgtactttgaatctttcttctcaactaaatatttacacatattaaatcagcaaatagttttagtctcgtctttgagccatatactattatttaaagaggtgcatgcctgcatggagaaaactgcaaggaggaaaaggattttgatattctaatatacattcaaattatgggcatgtactgctctatatcacagtgcccataccttgttttctcatgtaaaacaacatctaagtaagcaaagttaaacaaaatcacacgtaacgtcttggtaccaatttcaatttcctatcagtttctacattttctctatttgcaatgatatatcataatgcaactgatagataaatgacataaaaccaggctgacagtaagattgtgagccattgacctgcgtatacacgaggaagggaagacatgggcctttaggtgtgtcaaagaagacgagaaaaagggggccaggatggaatttgatgaaagaagggagagaaggagtggagaaatcggttggaagagggaaatgctcaacagaaaacacagctggcaaaaggaaattgggaggagaaaattggagaatcataagagtaatgatgagggaaatcatataggggagggactggaatgtgaggggatgagcattgtgggtagtgaaggtggcctttggcttgaggaggagagtgcaatatcctatatggcattttggccgggttctgttctctagttcatcagagattgatatacaccataagaatccattctccattcctttaagctgaatattatccagattttacgttctatattcacaagattaaagttaaaggtaaaacaaatgaaaaggaaatgaagaaaagggagtgatagacaatcaaattgccaaaactaattctctgctccgcaggtgaaggaataaatgtgtcaatcatatttaggagtttaccattttcatcccatctaccgggtagtaattattcaatcagtagttcagtacaagagtcatatgataaatacataacaatcattcccaaatcccagtccactgaacttttattgtttaagatgaagcacggtgaaattcacatattcagttgtcagtttttcataccaaccaacaaggaaactcaatgctttctctatctatttctctcgatcttcactccttcccacattcttaaactacataacactgcaatacaaccacacatggttacacaaatacgcatacatacctcttcgcaacctgattccatcatcaccttgatagatctactaacaagctccgtagctgcagaaaaaattaaggaaaagtcaaaacccatacatttgtagcatttggcagcatagcaccaaccctttgttagaatatctaataataacatcacaaaacaggaaattaacaaataaattcgttaaaatttggtgcatgattgagaagtgcttattctcaaaagcccttccaggaagttgacaaaaataagtaaaacccaaatacacgcacattaaaagtttagatacttatttttccaaaaatatgggaattaccaatgcctcttcctctgtagggcttgatgacaaccagcatggcaatgtagcctctgaaagtgttacggtgttcccccatcttacataccacggtgcccacgcatttacccttgtggaacgcctaaaaccaatagggaaattataaaataaaaaaaaatcacaaatctttaatgaaatataagtagggaaaacgagaattagatgaaaaagtgaagagataaggaaccaggaaagaaagctgaggccagagatagacgaagtaacggtacgtgaaaatggaataaggttcgctgagttcttggtccaccaggttcattaccagaggaaggtgatgctcgccaccgtaactaacatactcaatctccgaatcatcgaattccacattctccatggtttctgcttcgtctctgtccattgctccctctcttctcttgcgcagcaccaaggaaaacgatgcgagttgcttgggtaattctagttgaggccttacttcaacactgtttcgctgaaaagaaggtgaccattgctatttgtacatctctttttattagtatggatgaatacccaaattggaggtcttcaaaagtatgactctatgaggtgttttcacttatcacttattctcctagaagtaacaaatttaaaataactcactatcctatcactttaatatctaaacttagttatttattgtcactttcacttttaaaaataggttaatattattcacacgattttttaattttgataaataaaatgagtgatagattgtacttttatgaatctttttttttttatagttttattacatttgtacaatcaatataaagaaaaaaaatgcatggtcaaacacttttttttccaaccatgattttggtacaaaatagccgtgtcatacataatgattaaatcttcataagtgtgttcaaggtaaatatttttctttcaacaccatttattccatacttaataactaatcgggattcaaacttgcaccactttattaagaaacacaaaccatttaccatttgtgttggttggtcaaacacttttttggtctatggtattttaatttaagaaataataaacaaaaatatttaataaatattgattttagatttttttgtataattacatatattggtcaaatttaaaattaatgttatgctacttaaaaaatatatttcatgtcttactttcataatagaaaaacatctattttaccatttttaatttttttttatttgatgaatagtatgtttatctttataatacataaaaagtataatgatttaaataatttaaaatataattttattttttattttcatttaaactataattttatgttaatatttaactttgaaaaataaataacaattattatttgataaaaacaaaacataattcatcgtgtcaaagaataaaattacttttttaggatatagaataataatatgaaattataaaaactgatccagaggcccggaggaacaaaaaggcccagcccaatgtgggaagctaagtgcactatatctaacgaaacaaagacaatgcaaactaaaccctagtggcagtctcactcgccgtcgtcatccctcttccgtctagggttcctcttcgcaacaatggttgccgccaagaaaaccgtaagctctgtctccctctctctgcaactagcgttgttgatttgttcatgtttcactagctttcagatttagggttttcaattccaattcgattttaatggtttctgttctgtttttctttttgaacaaatgcagaagaagacccatgaaagcatcaacaacaggctcgctcttgtcatgaagagcggtaaatacaccctcggttataagaccgttctcaaatctcttaggagctccaaaggtatcgcttttctacactttcgcattctctctttgtttattttgggggaccattgtttttctacacttggctcagatccgtaactgatgaaaaacggtgcattgcatttcatactggtaatggacccaggatattaaataagatcaacattagaaatttcccccaacaacagaaagtgtgttaaaaaagcatgttgcttgcattatagttacaaatgcatttgataatgttaaagttccttgcagccgcttgcctaatttattgactaatttgatctccaaggatgatgtaatttgttttaaattaatgtggatgtttgcctttgttaatattttggcagttgtttatgatgatgatttattgatattcttgaattctctgcagggaaattgattatcattgctaataactgcccccctttgagaaagtcagagattgaatactatgctatgttggcaaaggttggagttcatcattacaatgggagtaagttcttgatccgatgcttttcttccgatccccgtgttttttacaataattttaatgttaatttacattagatgagaggttgaaaaatcttctgtttttgatttgatagtttaagtaacatgcctcgcataactattttgatctatatggggtgtgatgtgggtctgcagacctcatatcatctaggtcgatttaattttattggatttgacttgggatattatgttaatggtacttgttttatctgttttttattaacctgttgtggtttttatcatgcgtatatgtgttggctatatgtgaactacttttttatgctgaactattctgtcaattcaagtcaatgtttggttacatctaaaattgtctatataaattttggagtcactgagagagcttgggtcggtcatatgtttgaatgtcctgcattaaaacatgaatggttttattggacttgttttttaagcatctggtgattaatttccttcattgattgaattttatatgatctgcatttatagaagctgatggaagtgtttagctattgctattttgataattacacatgatatggttgctgaccatatacatttttggatgttttgcctgtataaattattgcacaaacaactggattgtaattttaactatcgatgataattgttggatgctatgatacctggtagatattgtcatttaacaaaatatttgtctcattaacaaaatattttgttgtttttagacaatgtggatttgggcactgcatgcggcaaatattacagagtgtgctgccttagcattattgatcctggtatctgatgcctcctttcctatttcaatatttgaaagtagtgtttatttttgtttttctaatgctgttttttatttgttgtttacaggtgattcggatatcattaagacactgcctggcgaacagtaaagtagtgttgaagttacttgcttgttatcttctggagggttttagtggattcagactttgaaagaatatcttgttgaattgtagactttgttgtaatgtgcaaggtttttgtgtgttctagctgagcaaaaagtaattttgacttttcaaagttttccggatgtttctatgccatttctagagatataattatattttgatcgcgcgtgctggtaatgcctgtgttatcgacgttcgcttgcaaatggttcttgacattgaatttgcgtggtaaaccccataattaagaactctaaatgggtggaatttctgtcaagctcttaggcatcaaaataagacgcatccgttatatatatcaagccaactgaaacaaatgttatttagttttcccaacacaatttatgtgggcatattaaacgcaattatgttctactgacacaatttagtttgcacgaccggggttgatgcgcatgttgaggaatctgaggaggaagtgctgtgtgtgggttccacgtcagagatttcgtgtagagttgggtgacggaaatgctgattacgaggaagggttgtttaggtgatgagattaacattgtctaaactaaatcacttggccttaggcagtgcattatggagagaaatcgaaacatgaaaaccaaatcaaacaaatatatagcattgttgggtagactagacacttgagtttataactaaattaagcatatttaggggttgactaagatttatgtttgcaatgtctgtaagaattggtgaatgacatgatacttaatacgaaagtcgttaaaaaaagaaagaagttggaaaaccaatatgttacacatataaattaaaattaactatacattatttcacagcacaaactcaaccacaacatcattcaaaactgttagttatacattctctccttgaatgtcttacgtgtgatatttatatttttataagtacaaaacacggtcccatggaatgtagtttcgcaataattttgtgtccgctgtttaactagttcgaggatacacttcttcaatgtaattcaagattgctcatgttagaaaggctaaaaagaattgttcgaggggtagaaactttgagcatagtttacagacaattatgttttcttgtttgaatagtatgaatgaatgaataaagaaaagagttaaacagtttatatatgataatctcagaatctcctcatcaataattgttggtgtccttagtttatttttctacagttttctatagagctttgatagaatcagttataaccgagagtattgttagaaaaatagagaatatcaaattgcacagaactgaacaaggagaaaatggaaccaattgaaaactttgttgtgccgtggaaatagagaaaatcaaattgcacagaactgaacaaggagaaaatggaaccaattgaaaactttgttgtgccgtggaaaatcactgccctgaaagcaaaattcggctagacctcggtgcaatccaaaatgccgattgctccccaaggttaacacaacgagcctatgaacacgtgcactcgtggccttaggctatggatatcacagaacaattgtccaactctttgtaacttttaaaacagaaaaggaaaaatatgcaaaacagagcagcagagataggagtgtcaaaaatcagaactgcagagaaatgtttctgctcccttctatatcagctgtgtgtctccctattaaaatagagaaaataggctgaaagctgtcctttagaatttctgtaacagctccattactcccttaaactccactaaaagcattttaatgcatttaacaaatgttaataaagaagatgtttcaaaactgatttgatttgcaaataaaaagcatttaaagaaattaaaaagcacaaaagaaaggcttctgtttttccattttccaacaatcccccacaaatggtaaaacatgaagagaaaggaaaaaataattgggcaaagaaggattaacacttaagtaccaatatcataatgattgaattgatacatagtgaagtaaggtaacaattttgtctaggcagtgaattactcttgaactaccatgactccaattgagacccccacaacacatgtattgccttaaaatctgtgatatccgcgataatcataacaagcgctttaatggccatgcgcacaccttgggtactcatgagtgctctagaaaactgtccaagtctttcatagaaggcgacccaccttcacactcacgtaggtgaatccatcaagtgcgtctcaaaagcaccaccataatcggctatggattcattaagagcataaaaatgctcagcctcataatctaacaagtggtgagtccatcaagtccatctcataaggaccacccaacagttaaggctatgaactcattaaaagatcaagggcttcgtttcaccacaaaaggtatccatcatagtttcctcaacacaaaggcttaagccccatctcccttgatgtttcaagaactagtttccttgttagacctttagtaagaggatccgccaagttcctctcagatcttacaaattctaaagagatcacaccattcttcaacaattctttaattgaactgtgtctaatgcgtatgtgtctcctctttccattatacacactgttcatggcaattccaatagctgcctgagaatcacaatgaatagaaacaggtacagatcgttttccccacaatggcaaatctgtcaacaagttccttaaccattctgcttcttgtcctgctaaatcaagagcaatgaattctgattccatagtggagcgtgctatacaagtttgcttagtagacttccaagatacagcacctccacccaaagtaaaaacatacccacttgtagaactgacctcatcattatctgtaacccagtttgcatcacaaaatccctctaacacagcaggaaatttacaaaaatacaaacaccaatccatagttcccttaagatatttaagtaaacgacgaagtgcagtccaatgttcatttcctgggttatgagtatatctacttagtctactcactgcatatgctatgtcaggtctagtacaattcatgagaaacaaaacactacctatgattttagcatattcagcttgtgaaacactagaacctttgtttttcattagatgtatgctagaatcatagggagttttcacaggcaattcatcataacaattaaattttttcagtatcttttcaatataatgtgactgacacaaagagaaaccattatcaaatcttctcattttaacaccaataatcacatcagcttctcctatatctttcatatcaaaatgagaggacaaaaataattttgtttcatttaccacagttaagttggtcccaaaaattaacatgtcatcaacatataaacatattatcacacattccagtccaattaatttagagtaaacgcaagtatcagaagaattcacaacataaccattacttactaaagtttgatcaaatttctcataccattgtttaggagcttgtttaaggccatacaatgattttctcaatttacacactttgttctcttgaccctgaaccacaaacccctcgggttgttccacataaatttcttctttcaaatcaccatttagaaaagccgtttttacatccatttgatgtacaacaagtccatgaatagcagccaaggcaactagagaacgaattgtggcaatcttagtaacaggagaaaatgtatcaaaaaagtcaatgtctttcttttgtgtataaccgacaactaccagtctagccttaaatctgtcaatagttccatcagtccttaatttctttctaaagatccatttacatttaattgttttacttcccttaggcaaatcaaccaaatcccaggtatgattagacatgatagaatctaattcactattaattgcttctttccaaaagttagcatcaatagaagttactgcctcaaaataggttttaggatcttcctcaatcaagaaagctgatacaaaaacatcatttattttatcaatatcattgttttcaaccaagaacgtagtaacgaaatctggtccaaaactactttctgttctttgtcttttactccttctaggttcattaacatgttcatttagagtagaggaagaagcaggcaaagataaagtaactgaagtagtattagaagaaccaaccacttcattaacatgtttctttaaaggaaattcttgctcaaaaaattctgcagttctagattcacaaatagaattatcattcaaacacaagaatctataggcagcactattttgagcatatccaataaatacacaatcaaaagtttttgttcctatgtttgtcctcttataatctggtagacccaccttagctagacacccccacactttcaaaattaataagttaggtctaaaacccttccataattcataaggagtcttatctagccgtttatgaggaactctatttagtatataacaagcagacaaaacagcttcccccacatttggttagacataccagaacttaatagcatagtgttcatcatttcttttaatgttctattttttctttcagctacaccattttgttgaggagtataaggggcactagtctcatgaacaattccattcttttcacaaaaatccttaagaaaaatggtctcatattcaccacctctatcagacctaagccttttaattttacggtccaattggttttcaacttctgccttatattttaaaaacatttctccagcctcatcttttgacctcagaagataaactctggtatatctagaaaaatcatctataaaagttacataataccttttacctcctctactaacagtgtttttaaaatcagccaaatcagtgtgtattaattcaagtagtttagtagttctgtctgtgacaggtttaaaaggcttctttgcgtattttgcttccacacatataggacacttagaaaggttatttacatatggtacattaatcaaatgcatatttttaagtttcttaatagaagccatattcacatgtcctagcctaccatgccacaaatcaacagactcaacaatataagcacaaccagtcaaagtagtagcattagaaacaacagaaatggtgttcaatacaaacaatccatcagcaagatatcccttccccacaaaattcccattcttagttattactaccttatcagcttcaaaaaccaatttcagtccagccctattaagtaaactaccagaaattaggttcctacgtaaggagggaacatacaagacatcactcaaagataaagtttttccagaagtaagtttgaggagaatctttcctttaccaagcactccggctgtagcagaatttcccatgaagacacactctccatcagcagcatcctcaaagtgatgaaaaagctctttgttcgcacataggtgtttagaagcaccggtatccagaatccagtccaccttgttgtccaccaagtttgcctccactaccaccgcagctatcactttttcgttttctgctagatgtgcttgaggtgcaagtggtacattcatcgttgtttcctgttcaatgctcataaacaatttttgctttcagattgttagaaaaatagagaatatcaaattgcacagaactgaacaaggagaaaatggaaccaattgaaaactttgttgtgccgtggaaatagagaaaatcaaattgcacagaactgaacaaggagaaaatggaaccaattgaaaactttgttgtgccgtggaaaaccactgccctgaaagcaaaattcggctagacctcggtgcaatccaaaatgccgattgctccccaaggttaacacaacgagcctatgaacacgtgcactcgtggccttaggctatggatatcacagaacaattgtccaactctttgtaacttttaaaacagaaaaggaaaaatatgcaaaacagagcagcagagataggagtgtcaaaaatcagaactgcagagaaatgtttctgctcccttctatatcagctgtgtgtctccctattaaaatagagaaaataggctgaaagctgtcctttagaatttctgtaacagctccattactcccttaaactccactaaaagcattttaatgcatttaacaaatgttaataaagaagatgtttcaaaactgatttgatttgcaaataaaaagcatttaaagaaattaaaaagcacaaaagaaaggcttctgtttttccattttccaacaagtataactagttctcattttactgattttagcgatcaagttattcatccacatatcatcaatatcataatgactcaattaagtacacaaattctgttatttgattctttgtattacactatgagagcatgctataatcttgaatttactacatgatcttttgtgtgtatgaggttgtgaaagtgaaacttaacaaatgtatcgtaaattcaaaccaagactgaaattttagtctgtttggttccatgtccaataggcaaaaacgggcgcaagtgttatctgacgtaacggaagaccaaaccagctactagaattttcaggaatgaagtttcctttctaaaagtaaattttaaaacagataatgaacactagtttggcacttgccttttcctgctcatcatatttcagtttatagctactactacacaggcaaaatattttaaaaatggaagataagttctcaacggatacttatataaccaactatcaagaccaacaatgcgcagcaaaatcaactttaatacaaattgaaactatagccagtatactactcgacatccatatcctgattattcttcctagccttgctgattttaaaatcactgactgccttatcaaaagtgctcctaacatgctggcacataagcatcagatcttgacatgcatcttttaacacctcgcgtgatggatcgcctacagatgcagagaaatcgcacattcaacagcaaaatactgatgcaaatagacaaatttagagcataaaaatacaagaaacgtaatgcaaatacgcatatgggcattaattaagagtcatgctatacatgatgtaatttgaagatgatctacatcagtacatcctactatgttttcttttatattattatagaagaaaaataattttgtataatgtgtttggctgcttaattatttatagatgcactgtctaaactctaaaccttataatgtgtttatatctgaactctgataagaaaacttcttagttcaacagagaatgtgatgcaatgataagaaaagtttttagtaccacaatgtcgtgatagaatagttggcttacaaaagtttggctcctattcataacttcatatctaccaaaaagtaacaaatagtaagtggagaaactattcgagattgtctaacaaaacacgaatttggtaggtaagtatacactactcttgtgattttaatacaaaaatagattcatggcagtagattgaggaaacaaatttgcaaatcacagtcacaatcacattatatccaccacgatgctgcatagttagttacctgttgtctggactctgatattaacacggttatctgaaggatgagggatgctgtaaccagaaaatgacactcttgggctgcaggacaacattaatgcaaaatccttcaaactccatttaaatggattaattaatcatgcacaacataaggaaaaaaaaaatacatatgaagagggagggggtctgtcaataaaaaaggagaaagctgaactcaattaggttttggtgagcatggattcctattcctagagagttaaaggaagttaggttaggaactgagaaagtaaaggacatactcttgatttaaggtgaatctaacagcgtttgcaaaagtatgatcctcatctacgagagaaaacgttgatttactctgatcagtgtatgagccgtgttccatcgctccacaccaacgatcaaaggaattcggatgctgcggcggcgagggtgggctgtgggaaaggaacaacaatatatatcatggaccaagaaaccgacgtcgttttatacaaacaaatttaaattcttcttctacctcttataaaattctcgcgtaattattttactttttacagcaagtaatttatgatgggtaaattagaactttatatattatattatacatcaacgcaattatttttaatatcacgtatcattgaaacgtattccttccaccaatcacaacctaccacacctcatccttaatttcattccacctattatattatgaaaattataagaaccaattaattcatatttgaagtaaaaaaaattataaatataataaaaattatgtgagaaataagttttatgattaaaaataattagtatcatttttaattttctgattattcatgagacttatttcataatttttttatcgtttatgtttcttttttatctgaatattaattgaatctcataattttatataaataaatttaataagataaattttatatattaaatcaataaaatagttataatctcaagtaacgtatggcttttatcacacacatattgttcatagatgtgttaataaatcggagaaaaaacaacattttaaaatttgaaatgaatgtagaaatcgaaaagaaaaaattgaatttattaacgtttacattttattccgtctttacttttgtctttattatcttttcaacacaataaatatacaaataatcttttgaaatttaaaattttcctttataccatacgggataaatgtacggacaaccacgtcaataatttttggtgcaaatgttcatataaccccatcacatatatttattatattttcatatttatttcttcaagagatatattctttgtctcacatgtatcatccgatcctttgaatacaaatatatagaaattttataacatgaaaaaaataatgatatacataaatttgtattaaggggtataatcccattagttgaaccagaataactaaatagcgtattaattttttaatgtatatttttatttcttagggatacaaaattacataaatttgtaggaataattctcatattatcaattacgtattgatgaaaaatttagctatgaaaattagtttttcatcattaattcaagcatcacaaaaatttagttacgaaatttaaaaaattacatgtaaattaatttttcactaatatatttttttatgtagtgaatgttcataagatggatccgtccttgttcgaacttgggaaatagttctattcaaaacattgtcgaacactaaatatgaaaagctctattttcatagtgatttattcaggagctatatatctggatatagtattttaaatttttaattatattatgaatattatcattgatgaattttgcatcaataaactagtaaatatcctgactagttgtttaagaattgacctgtaagaccaaaagggataagaacctacggattcaaaatgcagaaacaaagcatgcatgcacgtgaagcccaacactgcaagctgtcagagtcaaatttcaccacaagaacacaacatgccatcacttaccattttacataaaacacaaaaaaatggaccacgagagatatatatatagagagagagcgacacacacaccatagtctatcccttcataattgcaatttgcaatttgccattgctcttaactattctattttcagtaaagcactgtaaaaattgcttgtgtgtgtgtgtgaaagagaatctcaaccagcatgcacgtacaccctttatcattttttcagcctctttatcttttgctacctttgaagtgagtgagaaagatgttattccttctttgtctttctttctctctctctctgccttttttttttctcatccacgaaaagcacccactttgtttgcaaagttgctcctcttgcttcctccacaccttcttttctctttctgtttcttttgtctcccatgtttctttatctttctcttccacctgcacatgcatttgccactctcacatcaatgtcatgctttaaatttgtatatatgatgtgcttctcaaccccattaatcagttcggaatgttgctaatttaggaaacattaatcaacatcagttcaatcatgtgtcatcttttgtgggaaaatattcgttcatgaattttttacatgaaagttacaaacccaaaggtttattcaagtttgttacatttggtatcatgctcagtaaattggtataatctatatgttacatatgtaagccaatcttagatactggctacgggtgttgtagtacaatgcagattcgtccatacttaagcatatatatatatatatatatatatatatatatacttttatgaaccttttcctaagatcaagtgcagttcatttaagcatacacataaatcaattgaattgtaattttatgaaatttttaaaattttaattatagctgtaattttttttactcaattgatttcttattttaattgaaggaattttttattttgatctggaatatagcttttcttaagtagctattattttaacaaaacacaaaaatcgaagataatgttacactgccacttttaattaaagccaaacaaattagtaaaactgatttataatcaaaccaagttttgattgacgatacgtctagaaggaaaacacctagtttcaagtaatccctttctattttcaaaattaatattctcaaagtaatgttttttaaaaagtttttcttcattttaatcttaaaacaaagaaaataaaatgaaagaaaaaacaatttagaatatgagtgggtcatttgagtacgacttttcatcttaaagagaattcatttcttttcaattattctctcatccctttttgaatttaatttgtctttattttatatatatatatatatatatatatatatatcccttctattttgaaaacataaacttccatgtctgtgaaggtttactaaaaaattacaaaaaaaataatcataacaactggatcaattcattaatcttatcaggtttccccacaccctattgtgaaactatatattaattacagtcccggtaagcacagtggtaattattatgtttatcaattttttatatgttaatatttgcatatacattaaggatggaattgaaccggtgcaaacacagtaaatagtaaaccaattagccaaaccagatgaataatatttctaaatcaaaccaaatccaccgtcggtaataactcaacaatttgatttaattgtaactacaaaatatctatagtgaaccaattatgcttagatttagaactaatcctatcttaattaatatcaatgttttgaaggttaaattggaaaaatgtaaaatgaattatttatttattttttggtgtagaaaatagttttgatttaatgcacctgtgcagtgtttctacctgatatgccaattttgtttggatgttacgaaccgacattttcttctgacacagagagaggtagaccaacttatggattgcaaaatttatataaatttaaactgaagcaagagatgttccatttgaatatgtaaaagacaaaagatcattatttatgatcactagcttaaatatggaatgataattcaatctctaacaactttgttgactatatcatgttcatgtgtgtgacatctgcaaaaactattaaaatattgtagcatacttagtacagcagttacgggaactattgcattatccttaattgaaatacgtatcagcagttaccgtttcccgtgccatatttccttaatgtgactattctatgatgttattatttagtctacattatttactctattcctttgtatgtaatcctaatgaaggattggtacgtaggatgacagtgagtagacattttgtttaagtacccaaggagataaaatagtgtactttggatttcagaatctttagtgccttcgtatgagacaaagggaagagctatatatgttcaaaaagaaccacattgttgccatatatgtttaaatcattcaagaaaggagaacaaggtttgattgaagagttatgaaaaatttgacacttgcatctgaggaaacactttcatgagtggaaaattgattcccaaaatcacatacaagtgcaactgtatgagtagtagagagcagcctcctaggggggaaagtaagtagggaccaaaaacaagagatacgcttaaaacatgaaatacagtgggacaatataactatcactgccccacattcgaaggttataatctagacaacagatttgattctttaatcttggaaaccgcactttattgttctctttcctttcctttcgatttgaataattttgaaaaattgaaatgaacctgacttctgtatctcattttttggatacttctttagatacttggatatttatacatgatttgtataaattttaaattaattattataaaaatcaataaatttattacacgttattatatttgattttggattatattatagtgcatgcacagtttactcaaagttttacaatttctattttgcaaacaagggaaaaacaacaaattaagtacaataaaagaggcacaaacaattacaatattttaaaaaactggcaattttttgtgtcctagtgtttttttctcttcacttaaaatgacattcataattgaggaccaaagaaaagggaaatattaattgaatctaaagtgtttgaggtcttaattagaacgtatataataagattctgaatttctgataaactcattaaaggaatatacagtgaaaaatttgtggcacatacctcttcttcggattttgtttttgcatttgagttaggcgagtcagaaactcgaggttttgaactctctgtgatggatggagttgaagcagggctgggactggttgaactaatataaggaggtgtgctttgagtaccaacatctcttgtcattccctctttcttcttttctgcatagagagatacagtgtagaattgggaagtaacttgaactatgtccttccaagcaaaaaggaaataaagaacatggcttgctaattaagtgtgtgaacctggattgggaaattgaagagccacttcttcttgtgtgaaagttgctggctttgttgaaatgtgctttgaggaataaactagaggagcagacatggcaattctgtttattgagtttctaaaagatcttccactaagagtttttgcagataaacactccaatggtacctcccctgagagtgggttgcatatatacctttctgcttcattccactttgaatttaaagcaaaaccatctggagataagcattcccaactgttatagcttgaccttgcttgcaatgctacaattgaccaccaccatcatttaattgattcagaaaatttaagcacaaaaaaaatcacaaaccatgctaattatcaatgtgcttcattattattcacttgtagttgtacctttaagagcagtagtgaaagaatatgttgaagggtctatttcatctgcaacaaatgagagaatttgaggtgaaaaagaaattaagactttaaacaatgaactcctttgaattggagtgagaaaaaaaaaaaaaaaaaactaccttttaaagggtatccgggtgaagaagcagtgctagaaatggttatgtttgatctaaatgaccttgtgtcttctctaaagcttctcatgtaagatcccgagtaccttctggagttggttccctcacggctgattcgagctttcacagcccactctctcaaattgaactccgactcatctcttcttcttgagctataaggaagtggttcagctgttgaggccatgaattttagtcagaaaataattcagcagagtggaatgttgttgtaaatgttggttcaagtcactctcactccaactcaaactagcataggtttgaaagtgggtgctgcaggttcagacatggcaaaaaaagagtgttctgaagttgaagctttttgtctaggtaaggtataggtaggtggaatgtgcctttggtttggtatcaattcaaagaccaggcatgcctaagtaattctgtgaggagtgtttgtctctcctaaattttgctctttcactttttgaatctccatggtgcaacgacatagcctcaaatattatcattctatatttgctagtatgttatttctttttttggcctctgcattaaactcattggactctctcggtaacttttattattctttgacccctaatatcctagaccagtaggtgacttttaatcctcaagtgaatcatgggacattaacattagtccctattttttatgtggttatttgctgaagaaagacaaatggaaatttgtccatctttaatttcctttctagttccataaattaggatgctgtaattaaggccaaaatgtcgtgatatcacaatccatccagcacacatttccacatggagacaattttaaaaggttataaaaaagaatggatttctcatttgttagacatttcatggtgaattttcattttactcacattgcagaaaacaacacgaaataatgcatttgccccatgtatttgcatcaacatcacctttgggtgatgatggctcctcatattttctgtaggggattgtcacagcagcacctacttggcataccaaaatctaaactctgaaggaaggattattttgaccaaagaaaggaaagaacaaaacgatactctaacaatcatgatgagactcataaaaatttaacaactaatccatccttttaagaagccagattcaaagagcaatttgaacttaaaaatatttaaaactagataaaagttaaaaccaaagaaaactagataaatcaataaaagtatgtgtaaagtcacgagacaggcaatattttttaattaaataattttaagcctaaacttatattgcaagttgcaacttctaattttgattgccagaaaagttatccttttagcttttcaacttaatgttcatattaaatgattaagtataattgattaatatattaaatttaagattaaatcgtttaagtattatctaattaaatttaattcttgtcaaaaataatttttaggaaaactttatttatatcctaattaaactcggatatcttttttcgtatcaatcaaagtattgggaataatccaagtcccacatcggctagaaatagtgtcaagtcagagtatataagtggagaacaatcctcaccctatgagctagcttttgggattgagttaggtctaaacccacattctaagatggtatgagagaacttccatatcaaataaatgaacattgatgtgaccttcactttgttgatgtggattgtgcataactgcatatcattttcatataagttagtaattaagtgctgcataaccaaattacatgtcttgctcacaaatatgcaaagttcctcaattaagacaacactgaattgatgtgtgaacttaattgcgtcgacttaaaaattcttaatttttttttttaatatagctaatattgtatatcaggccaggggatataaaattgtgtagcgtactgcaataaacccttctgtttacaagcttccttttctatttttttgagcatgaaattaattactaagtattaattgttactccattattcgttcctctgatataattgaaaaaagaaatataaataattcgttgttctatttaagcagccaaatgtgatatagataaaagttttcatataccaataggttgaattgggggtggtcagaacctccattagtctttatcggatccacctttaatgatctcgttttatatttaatttaaatggtcaaagtaggtgtaatttggattgaattttcaattcattataataatttcctctccaaatagggttggatgcttgaaattaattatttgctcattgtcaatatatttggttacaataacacacgaggacgaggttaataacatgaatgattaggttaggtgaggatttaaacttttttctttttgtcgaggatttaaacaagaaaggttaaagtcgatacaacaactccttaattatgttaccctaaggtacaaaagaaaataacaattcgttcggtacatatataaataaaaaatgataatacattgtacccaagatcaagaaaagagaatgaccataatttagcaggccaacatttatattgtaattatggcaatttgattgagagaggctgacactgatgatgcaccaggctcaacaaatcactgatttctgcttgataaaatacaaattttttatcctgatacccaacccaattcaggaaactcctccattgaggtgcaaatgcaatcagataaattatatgctttttcaataaaaaaaaaacgcataggaaaaaacaagaaggaaagtatccgggaagcttctaaatcaaagacagaagaagaatgcgtaattgaatgctttactctgttaaagtttattttattggaaacttgaagagataaattaggggtacattctttaaattttaataacaactggctaggaaggctaaagatacaggttagtcatataatattgtataatttttttaataaatacttattttcgtaatttgttggacattgatgtttggatgcttaaaagatggaacaataaaatattgtttctaaatttaaaaaaatatgacaaatttatctcaaccttaactctcatccttttatccatttatttattttaaatttgaaagagtataattctagtataaaataaagtgacggttttaaattatgattgtgattgtattataatgaataaaaaaatctttatattataaataaatataaaaaatgtaactgatgttatcctgattaaatcataatatgattgtgaaatattaaaatacttttatcattacatacataatttagaatcatgaatgaagtgaatgaattagttttattttttttcctcccaagacttctccaaatttgagctagttgtaacgtagtgaaagcccaatgggggtgatcgcatatcagattttcactgttgggttgttttcagtgtagggtggatgtggagatcaaaagagtggttgtcagcgcatgcaatattggagtgtgagtgagaatgtctttgttacgggttccgcatgtgcatgtcacacattcttgtcgtgaccctgtgacaatgagtgaggttggggccctcacattatggaaaccaggactagggtcccacactggacctcatcatagccgtcagttttgtctgatgtgtatgcaaggtaggtatcaagaaagagagaggctctgttacccccctcagctctgggccccatttacttcatttattttataaagtttttctacctttctattctacttctaggagatatattttgtccccactacctgcttcccagtgaaatgtgttattgtctcatcttaatgccactggaactacattttcatagccaatgcaaatttccaaggactcttttgggaaacaattaacatttaattgcacatcaagttaggccattgaagataacaggtttgtttagtgtgtatttagatgaattttgaaaaaattgaatttttgaaattgatttggttaaaattgatttaaaagagaattgtttcttataaaagatatactcagtctttgcccaaaaagaaagtagaggtgccttgtctcaatatctcaaaaaccaaaataatagtatagtggctagaacgaggaaaattgcaatttcaaagacactatgttgcaacaaagagagtagtacagtttgctgagattgccgcttttctatctaacatgggggagtcaaacaagttaacgaaaagccaacatattcatatatttgaaatcatgaaggcctattcttgcaggttgtgatagaccttattcatgaggtcttaagcttttgtaaaagctgatgagctctacaaatacccatgatcgtgtcaatgtcacacatagtgacaatatatagcattagtagaattagctatatatttaactatacccatcgaatgaagttgtgtattgtagttgtatatctcaaataaaagaaccgtaaaaaattcaattcgatgtttcaccaaaaagtgtggcaaagtggaggaggccacaaataaatcaacttatataaaaaattccaattaaaaactgaactttgaaccatgtttgaaacattacaatgagtgggagacaaaataatcgtctgattgtgttatttttgtcgtgatatctttctgaaataacgtcaaattatatcattgataacttgatgttcacgtccaagaacccgttgttacctgtacatatccctagtagccatacacatatctccaaaataacttcaaaagaaatgagtgtcagtgccacaaaggttagatcggagatggaaaatgatttacatatgttcctagagaattatgtgttatttgagggcaaaataaatctaatctgatttttttaaaaaaatgagtaacttacttttatatttaatgttttacacaacttttataagaatctagacacgattatgtcgaaatactccatgacaattaatttttgccaacgatatttttagaaaaacacaatccaaaaaagtagggtgggggagagaagaaaaaaaaaataaaaaaaataataaaataggagggaaaaagaaatcatggaccggttttgttttgcatctagttttcaagaaatctaagatctaataacaagcccaactatacttttcgtgggtctcatgttttaatcttctccacaaactttttatgcctcaggtattatcgattactttacgtgattttgatatctttagttcatgtttggatattttataaaattaaattaaaatagaaattcatatgtttagagtcaatatttacatgtttagttttgtgtaaaagaattgatgttgagttaaataaaaaaattatattaaattttattagtggtttatttttaaaataaaatcattcacttcatttcaaaaatattttttacaaagataatttaatttaaaatcaattttataaacattcatctaaatatacacttgtaagatttggctgtagtgattttaacttattcatgaatttttaacattagttcgactcaaaaatgaaaatacatggacaaccaaaaatctttacgtggtggataatttttttcttattttataattatgtaaatatctatcttttaacaaattatttaataaatactgacttttacaaattagttttacacatgaaattaaaaataaaaaaggaactttggagtggctgttttaattgtttaaaatttgacattatttggagacggttataacttgaaccgctctctgaccataaattgtatgtgtctaatcaaatgtattcaagaaaattcattagtttcttaagattttaaacgcatggtagttatttctaaatacattgaccgaaaagttgtatcctttgattttgtgttcagctgttcattgggatccatgcttggtaactttgtctaaaaattatgtcatataaattcccaaaggcccaagaagaaaaccagctgagaggattacaaaagggggtgagtgagagtgaaaaaacataaacttgttgcatggagagagcatattttggtagagggattacatatcatatattatatgagcatttacactactaatatatgccctacccccattaaatccgtccatgaagataaagaaatgtaactctagccattaatacaaacaaaaacatgtcatatgatatgagctatggctaacagtaggaacctgtggaatctagatatattcctttctcttgtaaaacaaaccggttcatagcagatgaaaacaggggagaagcagagcatgaaacagtgttgtaaaagatttcacatttatgcttttgaattagtaagtaaaaacaatcactctctcacatggctttcatatcaaaggacattccccctcacataacaccagcaaacatttctaacttgctctttcaatgactcctgcaatgcaagttctctgacctacacaacacaacacaacaacaacaaaaataagaattacaccaaatacttgtaagtcgaccaaatgtatgaactgcaaaagttattctttggtgcagagtatgctcttctttttttgtttgagccaagccaggcagcaatttctgatatacaaaggagaatgaaagtagtacctaattcaacatgaagatataagattgacttgatgggaaaaggtgaataacagatagtgagtttgaatccctcactaacaaaaaattaacaactaatatttgtcgataaaaaaaaaaaaaaaatctgattcaacctcaagtccactgcattgtttaattcacttcatctgagttttgttcttaaaaagggtctggaaggcttaaggaaagaggatgtatcaaaattcccgggtagactggaccatgttgtgatgagaatcaatggcagtaatggatttttatccttcaataccagttagcctaatgatatactatgagaagaagattgagagggaaaaataagtgtttataatgggattttttttttcttggtgtcactgctgccattgattcccatcacaacttgctgcagccaactcgaggattcatgacttgcctcaatgagatgcaaccattatattagctgggattggtagatccgttacatgcaatatattattatttattatacattgattgatatttgactattttggaaaatgcactcaatgtagtacaccaagctgcattgattggtagtacagttttgcttaacaaaaaacaacacccacacaacccgttgagattgtactggcttcatgtactggaatcctgtactacatcgtctccttggtaaatcaattgttctactaatcaatttattgccatatatgccactgtaactcagtctctgagcttcaaaaaataatttgaaggggctaaaataactagaataataatgtataaattactaccgtaaaaaataataggttatcatcataatacttcttttctgaataaattttttaatgctacagatattgattaaggtttgtcttttttaaaaattggttaaacatatttttattctctctaaattctataagaatcaatttataacttaaacaaaataagagttatgaatcaataaaaactgagaatattgattcacggaaaaataaatctaaatatttgaaaaaaaaaatagatatgagaaagacttcataatattgcaaatacttaaatttttcttaaaaataaatcttaatgattcattaagtgggatgacagaagaaatcaaaaagcaatccattctttaaatgtatcgtgactcatttttagtcgctcttgaaaatgctgacttttggtttttcatttttgaaaatatgtcatgataaacctttatcattgactctgtttgttgcaaccaacaatgatactaatttgtgataacttttgaccattacaaaatatccttaatgttgaattatgaatttatattctgtgacaattttcaaccataccatagaatacccctcaccctcaacaagaatttccatacaccatggctgcaaactgggtagtttttactttgctcaattaagctgctttggaatctttgaacccccatcgtctaaatttaagaaaagtagttgacatcagtccttgccaattgtttagtcacgtatatattccttgatcaggactacgcaaaatgaactgtatttttggaagatttgcacacttatctatgtcttatcattacgtgcaatatgtgtttgatattcattactttcaataataacaaattattatatactgtactactttatttgttgtttaaattatactactacctaaaacccatacaagatggctgacctaagagaagagaaaaatagggtccctagtctgattctccctcagaaatattgtctcttaacaaccagttccaagaacaaaaacactcatacaagaaacatttgttatgcccaattattttactgtgctgtcttttggagattaaaaattggatggtttatcaatgtacacagataataaaatcaaaatcttcaaacactaaataggctagccctttcacattccttttgaaagataatcaaacacttgaacacgttgaaaatcttgtttgatcatgcaaaatcttgaaaatcatatctgatcatgcaatatgcatcaaaacatccagaaatacacaattactgacaatttcagataaactactaatttagtcaatcattacaaattagtagtattaactaagcatttccccaaagacatgcataaaaaaatgtataaggccctacttatctaatagaaataagcaatcgagaagacaaggagttaatacaaaccatttgtggacaagtaacattgcatcctcgttggaacagaaccaaagagggtagagaaagatgagagaagaaaatgataaatactgcgatgttttattgacaaaagccgaatacaagaattctaagacatttcaagccgctggatacctaaatccctaagagtgtgtttggatagaaaattttaattggggaaagtaatttattaggggatttaaaattcttcaatttaaaattcactgtttggatatttttatacgagaaatttaaatttttggaattttaaaatagaattttaaacaactaaaaatgtggaatttgaatttccctctaaaaggtgagaaattgaaattctcttcttttttagaagctctaaatgcacaactttttactccgtctcaatcactgacatactccgaccttcgctactctcacgacaccacccaccttacgtgttttttccgtgaatgaggttcaaaattttaaaaatgaagaaattcaatttctttatccaaacacaaaattttgaaaataaaagaattttaattgatgcattttaatttctctgaattttaaatttcctgaaattttaaaatactccatccaaacatactctaaataaaatatcctacttatacctcattatttttctacctgttaggaccactattaatagtcctattttagtgccctacataactattccatttgtcaatggcagacaaaattatataaaactacataattttagtgccacagcatgtagaaacattcaaaattttaacatcaagtaaaaagattagtagaaggatgtataggagaattttaaattaatctttacaaactaaattgtccaaaataagaacatagagcacaaagatttagaatttttattatgccgaatatgtcaaatatttagaaatcagcacaaagattcaaccaagcaggaagataatgctttagaccgactgtcatttaccaaagctatggtttaagaagcacaaacaaataatcctgtttcaaagaataaagccatgggaaagaagagactttctcaaatccctttcaaatataagatatccctcataactcacgtcgttgcatatagcaaccatttttaatttctctccatagtaactatgaagaaagcaaggcagtgtatatatctaaccctggtaatatatacatgctccccacagcataaccaacgtgaatagcatacagcaaactgagcaacgagagcttgaacacatagtacaaaggagcattgcctcaagcaagaaactgccatagtcaaactcattcattaaaaaaaaaaaggactactgaccaatgaaatgataagtcaaaaatagagtttctagtttgatactctaagacaaactaatgacacgtccctaaacagccaaacccaaaacttagcaagaacacctatatataaacttgttctgagtgttaactgttacaaatttgaaaattttaattgcttgttgaagtaaacgaataatatatatatatatatatatatatatatatatatatatatatatatatcatcaaaaccttccaaaatacatgaacaggttagctcttttgcttacctccgggtaccattaaacatataaaaacatccagtttcgttagaagtttgacaacaagtactttgtaaacaaggcacttacaatattgcaagatataatttgctgtacaaaaagagcatttaagacaaggaggaaggtaagcataaaatagacaaaaactggatacttcttaaatataatttccatacttaaagaactaatagggatatagttccttttttttttcgcccgactctttgctcttaagaatactagtttttaaaaatgagggattgtccttctctcatttaaaaaggtgttatttttgaaaaaatatcaactttctaggccattggagtgttttgaagcaagtactccagtactgcattgactatcttgttagatattgttgcagatacctgctgcttcactatcaacagcaccaatctagcaaagctaggaggttgagctgtcattgaaataggatttgagagttcctgcacaatttggttagcacggagttcagatattgccaaactggaaagggtggaattagatatacaaaagacttgtgcatcatcatgcaccaccgtggatgctgactttcacttcagaacccggtttgaaaaccatttttaggatttcacggtgtgaattgtgtattgtacaaccaaattgtgattttgtagatacaaaaattaaaacacggaagggagagtgaaggagccaagagagtttcgaaatttggcccactctgtattaaaatgtggataaatttaaatatatattagtacatataaagattaaaaatcattaaaaaacttgaagtgaaactaaatgaagttgtatgcgtaatttgtaaagatcaaattatatgcataaaaaaccaatcatatgctttgagggagaactacacgtgtttatcaaatctagaggtcaccataatttgaatatgacatattacattaatttatagaggaaacgactgctaccataacatacacatggtacattataaaattacagcatacaagaatcaaattcgcattaatcttcactacaaaaaaaaaaaattgaaattttcaacggtcaaaatttgttggtaacatcataaatttgtctgtaaagtcaaattttcgatgaatttccgactgacaaggaaaagagattaaataaattatatttaatggttacactaaattcaaatgtaatagagttaaagggcctccaaaacaaagataagagaataaataaattatatttaatttcaggggcattttattattttattaatttcaggatgtgttatgcacggtcagattggatgctgaatccaattgcctgtttgggggaggggacgtggagtgctgtttggaataacagatgatgaggctttttaaggtggttcccaagatggatacgatttgtgatttatgcaaatgttaggcaacatatagcagaaaacgacaattctctgctgtcatggctgaaggtatttatcaatttatgtatgctggtttatggaatatatatgaagcaaatcagctcttgagaaatgatgaagcatataggacaatctgatatatgcacttttgtggctgaagtttgcaagtctaataaaaataaaggtttgcgatgcaatattggatacatgctaggaaggcctttatgcttctctatttgtatatggtctattgcatttgtttttatgttagcttgttgtgttacagggtggggattgtggcagaaatttgttactgtcatcgttttcgtatttctgttgtagggtacatcttgtactctttattttaataatactttgtttaaaaaaaaattaactgaacattacaatttagattaaatttgtaattttctcccaaattgagattcaatagccaactccacaatggtcagaacaacgaacccatttctttaataggacaaattaaaaaataaaaaaagcttacatatatttaaggtttctaatatcaaattttattttatatttttaataattttgtatttatttgagttatgatttatttaaaattttattttaagtttttatcataattaaatgaggatgataatgatataacatcattacaattattgataatattaaaaatatcattttataagatcacattgtgtgctgactaaaaaaataacatgcaagcgattcaaatttgctctctacatcaatctcataaataactaacttttttaataagtaaaaagtatgtgacaacaactaatcaaacttaaaaatgagaagctaatatgatgatatccaaaaaaaaatatataaaaaaaaaaccaaccatatgcgtcgacgtaaaaggcacgtgtttataaaatatacaacaaataataatattattattatattatacaaacacaaccacaattcgaaaagataataaaatggtggcaaacatacttcctttccttattcatatattttttgaaacacaactaactgaataatgtcaagcttttcattaaatagaaacttcacaactacaaaacccatcatactccccacttattattattattattcagtaacttaaatcatactactacaaaggccaaaaaaatacaaaaagagttgatcaattagtcggtgaagccagcaatggtagcattgggttcaagggccttagcagcaggggaaggttcaacagatggaattggctcaacagtcttgacaagaagctcctgaggcaaatccttgataccctttagataaaatgtgtacaaaatcttgaaaggatacacaatctgatgcagcttcacttgacctttaacaccctcaaatatgccagacccaccagtcacagccaaatatgtgtcctcataggtcaggtaaggtccctgcactgctatgtgaccatagtctccaaagtagaagctgaagattgcttcatacctgtcccctttcttttcagctttgttttggatcaaaatacagataccagatgttatcccaatgcgcttttgcaaatctccagtgtacaactgcatagtatcaaaccaacaattacatggaaaattgaacatttgcaactacatcattcgaatcataacaatttaacaacaggatatatgtacctttatagctaataaagttaaggtttgaacataatacaaaacaacaaatgattcaacataacataaaattcagaatattataattttataataaaattaccataacaaaagtaaatgcgttcagatgcagcaaaacattgaaggataaaacttatgtacagctcttctgaggattttattgttgttatctaattagaattgaagttacactttattaatttgcataataaaactttgcattaaagttcaatatagattatctagttaaaattccaatattcataggagatcaacacaagaaatactgatgaaattatatctaaattttgtccaagaatggaagaaagttaccttgttgctaaaggggactaaatcaccaagggaattgacacttttatagctcaatcgaagataaacagggcttccacggtcacgctcgttgatctcatacacactcagttcttggactttttctacaaattagtcaagcaaaaaaaacaaaagggtcaacgcatgatcaagccaaacccactttcattcagccaaaagaaaaaagtgaagcaaaaaaacaaaattgaaacttgggtatgtctaccagactcagcaggctcagcctggcttctacaagtgaaagatttcctgggaactgaagacaagcaaaagtgtggcaaagtggagttcagcttgagatgtttggtgtgagagtggtttgatgaggtgaagggtaagaaaggtttggtaggtgaaggtgtgaagaatgatgttggtttggcactaacaggcttcacgaaggaagaagaagggatggttttcaaagcatggcttgaataggttgccattcttgctgatcaatgtgtgcttactctcactaagttttcttagatgacaaaacaagaggttatgttatgtgtgatgtgatgaaggcaaaggtaatatatatataggaaatgaggaagtgattgtggatacaaagggagattactgggttaacgagtggacggtggaagagaggtgtgaatcatatggtgagaaatgtgatgacaatgggaaagacacacgtttgagaaggtcaaatgttcaataatggctagagggatagtggacggtctcagaatagtgcctcattttcttttgttgtaaatcagagtgacacttggttttggagggggaaattataatttaaggtactaaattaattaattaatgtgctcgtgaacaatgagcttgtgttctaaaatatactagtatttcattttttgtttctttttgtccagatttttttcttctgttttaatcatgtgttgttctattgcaatttagaattggacaatgcatgctgcatgcgtcagctttgcatctactaacgtggagcacattttgaagaatgggcatggaggaataatacagtactttttgaggaagatggttatgtcttgcgtgagtggcgttgtacaggggaaaatcccacttgaattacggacttgaactgagaagaattttggaggattattactcctcattcttctaggtttctagttatttttcttatttgtatttttattcatttttttcgtgtgtagtttttattacaatagttttagatatactttcactgtgtcaaagtttcttggtgcaacttatttaaaaaagaaaaaaagttttcttcgtgccactatgcctttgttactcacgttcctatcgtcgttgagtacaacaaaaatgcaagtaagcttattcaaatttactttgttattcattaatataagttatatttaagtgtttcccttaagctgactttaaatgtgttatcctcatcttctttccttaaactttatttaacaaatatagcttagcaacaagagtaaaatactgaaagttaaatatcatgaccattcttcatagctagtgtttctaattagctattcatctcaatccatcaaagttgttgtttttttttttttttttttttactttttcttttaagaatggaccaatcaaaacttgtaattgtagctgtgtttcttgcaaatacaactgagatgtaaacgaacgaggactatgcaacccaagaatcaaacatgagtgagtacccatctgctacatttcagtccatcactaacatatatatatatatatatatatatatatatatatatatatatatatatatatatatatagtatctacttgttacttcacaaaattggtatgctctatgcactagtgtgggaagatcatgagaaccaaaaaaatgggcatctggtgctgggcctaatcgaagagcaccaagttccaattgaataaaaagggaagttcaaacagcccaattaatgaaaatagaatagattgacccaatatccactagaaaaacttggtctaacagtatctctctttcccttttgggcttttctcttgtcagctaattgagatcatctttgggtcataaggtaactgcgttaataatctacatactctaaaataaatttacgaattcattaatttttttattaatatagataatttcccatgttatatatgacacttggtataaataaactatgaatttgaacctagacagttgtagaaagtagaaacatcaatagaaatataatatccgcgaacgtagaattgtaaccaatgatatcatttggattggcgaattttaaagtttttaatgaatataaaagtttttataggctaattgcattaacctctctggatgttaatactaattaaatttatatctttctagtggaaaagttacatctactttctcttatttatataaatttctcaaactatcatgttatttgtttaaaaagttatagatacatcagaatcaaaaaaattatagatacatttcttatttgtatttaaatattatacacacagtatccttaaaatactaaactaagtaaggaaattctatttttctagtcaaggaaatggtctaagtgtaattattattaacttcaaaagaaaacatgtaattgtcccatttttataagaatgctctcttaattcaaatttaaaagcatttttgcaaatatatcatagaaaaatgaacatgatatgatatgacataatacaatgtatattgaaagtaaaaaaataaagaaatcaaatcagatgtatgtataaaaaagtaaaaaacctacttccgagttccatatattgttgtgtttaatggctaaatgttattaagattcttaatcttaatcaaaggaatgagaaggactcaacgcaatgacagataattcagtaagctctcgaagccatatttaaatcaaattgctagctagcattcttcttgtacattgtcttgtatgtaatcaaggaaaccaagtacactgaaccgtaccaatgagatatatggttatatgtgcataatctttgattaaaccaagaaatttacaagatcagctattcatttgtttttattattttacctggaaaataatttcggaatgttaatggacaattaggattttatagaaacatgaagtggacaagagagttacaaatttgtgaacgccaagcaaaaaataaaggttttgtctacagtatcaaaggcagtaaccatacccactcacgagcatttcacgtgttggcatgtcttcttagtgcgttacagctttgcgttttggtccattaagatattcttagacgaaagcccgaaaggaacatggttcagacaaatttgatagtgaaggccttctagacatatttaaagttcccatgtcccttatggttagacccttcttcccacaccttggggttgagctaaccccatatatggatcaattcttcagcatgaaaatcacattttaaaatcacgcccatgctcatgaacacataccaacctcatattacaattttcaacctcttcattttgtttggtttcttcaaattttcaatgattttgtatccttaactttttttaacgtggccgaggataaataaatataaaagatccatgtttttataaggataaactatcttattatgcctttaactttctttaatctttatttcctaaaaggataagctattttaaacatgaacttattttttatcgtatataaaaaggaaaacaagatcattaatttgacattttgcatcttgcatgtcatcatgtaagagaagttcatgagttgaaggaaaatatagtgtttcgatgatgccacagcttaagggcataatagagcacgaccaaacttttctttatgtttccaaagaaaaaagaaataaaataaaatagataagcggaagctgcaattctaagtgatatgggtgaagcacaagacacaacatgtgggattatgcttgttgttaatttaagatgaagccctaaatatgtaagaattggtcgggtttgaagaagtctctcggattaatttcagattcagctagcagtattaattttctggcttttattacatacatttttcggcttcaaacttataggcgtgtagtacacggtagtagataaaaataaaaataaaaataaaggagtcatttaatatctttgattttttactatatttgtggacttacttatagagacagtgagagaatcttgctcattgccacacgattaagcacattaggccataactcgtggagccacagccattttacatttatactctaatgtcctttaagataaccttctctgacacacccttatctttatatcccatatttgaaatcacatgcctaactttgactattagcctgccattacagttttcggacgatctagtgtaagatagaagaactgaagaaggtggcatatctgttagttttgaacaaacaggaacatgggtaaagaccaaattaaattaacgctagaccattgtgcttttcacctaactgtatggtacaaccatgattttaaattacactcacaattgtattaagataaaaaaaataaaaaaaaaactatttattatagatatttgtgaaaaaatacaatcgcaattacagttacaattaagttacgataagtcaaaatacttcaacatttcatgcataatattaaggttgcataacactattgtttaaaaatatatcatgtgtacaacatactttacccgtgttaaaaaacaacaactataagctcaaacatagaaataataaaggtcataaatcattataaaacttaattataagttagaatgtattcaaataagttagaggttctttcaaatgtgtcattgattaaattttgaagagggaagtttcacacggatataggtgtcacaaataattggagaatatagtcaaaacgacatgacaaggaaacttcattgcttctaggcctcattatgaggttcttattattatcacgaaaccatggaatggaaagctaaaacatctaagaaaacattggctttttacttagcatcacctaaacattactattatttgttaattttgcttaattcaatggccgaccacttatcttggtggttgaggccacataaatgttggtgcagagagagagagaaggggagcatggaatctgaattggggggtcatatagacattttctttaggaaccatggaccacacatttcgctctataagaagccctttggagccccatttgtaacattgcttcaaggggtttcaagtttcaacacacacacactgtctctgtacactacaaagtgtaagttattacaaagaaaggaaggagcatagactcaaagatgagcaaagattccatgagaagttcaaagaagaaagtttcatgcagaaggcttggagggtacctcaaagagcagaaaggaagactatacataatcagaagatgtgtagtcatgcttctctgttggcatgactagaatcattctcatcaacaagcattgtttaacgttcttctttgcagctcatcatatcgtggatcagcacactctagagtcctcaaagccatagccaaggatcaaagttcaagcatgcagaaaaaaggataaatgttttgttagctctttattattattattcactatgtaaatagcagagaaagtaacgttagagacaattttccttcatatcatgcctaaaacatgtatgttctctacgtgcagaaagctaattggtgaaagtagtgaatcaaaatttccagtttctattctgcatttggtatagatccatttgtttcttttgattctgaatcaagctacaactctttaattagtttgaaagaattaattataattggcatattttgtttattttgtatggtttggtacgctacaaaaaccattgagaataagctaatgataataaggcgtttctacagtttttagtaagtttcaaggttttcatcttgtagtgattaaaaaaagaacactaaataattgaaggttttctcgattagatggaggagaatgttgcctttaaaggtcaaagtaaaaagttaaaaatgaaaagcgaggatgcataagacctatatttatatacctacaaaagaaggacacaaatgggtgcttatgagctcatgagcgtgttgtgtcttttacgtaggctctatttgttgaggtcttgtcaactcaaagttacattatattgcattgtgaagaagagtttgtgcatcacatgtgggtgccccgattatatgacccttatttccatttttctcttggttgctttgggcatgatttgtctttttttaccgttttatccacttattgatttgtctcctcagagtcactatttcataagactttctcattgcatttttttttctttgaaattccttctgaatagtttttatttgtttcggtatatatataggttcttctaatggtatgtttggactgacggttcggtgaatcaaatttgattttttttttttaaaatggtgtctttgtaaactacttataaatgcatcaaaaaattcatgtattctatacgattttgtttaattcatcacgattttggtaatattcaaacacacattagatgttgtaactgtagctgtttgaacacgaccaaacagtaaaaaaatgtacattctatacgtaacaaaatactaacttctgcgttaacatggcataaagatgctattccaaacaaaatactaactgttatttccacactttttgccagtgcaaattttgtcttccttaccgttgcatcatttacgtgtaggctctattgttaatctcttttcgatcccttgacaacaataattgagacaatcgtgagaacctaagaaatgtatagtatgaattattcctaaggaccagctgctacattatatgtgtgtgaatttagaaaaagaaacggatatgaactaagctctaatattcctatttgacactattcaaacatagagaacgtttgtgtctgtggcatgatagaagaaaaaaaaaaaaacagtcgataactatgtagttcaaacttttggagcctaagcaatcaatttatcaaagtattactgtgttatggtttgtttaaagggttatgtttctcgcctatatacacagatgatccattattgctgcttttactttcatttatatatagtgatgggtttatatatgatctatgatattttgctactcctgttagaattagaaaagaagactacctactcaagagtataggtggcaaaatgaggtatccatctaaggattgcgagctatattgaattaggccaaaaagtctaaatttaatttagacttaaatgatgaagctcaagagtcatgtaaaaatctaatttttacggtcttatttcttattggaccataattgggtcagcttaaaaggtttgcatttaatttggattaaaaaaattaaatcaaaatcctatgtttcatctttagagtcaattcagttagttcgaattaatttgtcacttctactataagttttctaattacaattcaattttttaatgttaaaatgtatttttcatcctcaaatatgaaaatgatcgaaattcatctatgcaaaaattttaatataatttttatcctcagaaaattgaaatatatcatttttagcttatactcatgtttagatataatgactttttgcatcaattatacatataaacaatgtaaatgtgatgctttttacatttgttatatttatattaattgtgtatataattaatgtaaaatatgaatttttttacatcaattatgcatataattattgtaaaaaaagcaatacacataggttcatatatctgaaacttactctatgccaaaaaataacatattttaattttatgaggacaaaaaatatactgaaaatttttcaacaacaaattttgatttttttttttttgtattttgtattacgaaaacacattttaatcttttttaactaatagttaagcttcccattttaatttacctagtaagaagtgtttttttttcctttcccatttcaatcgaacaatgataagtttgagagtagtcagttagagaattcaccatttctcatcattgaagagcttctatttaattatttatttcttgaagaaaatatttcttgaaataaaattatttttaattaatataattgtatattcaaaactcgaatttaagaccattcattaaattgaaaataatttcacatcatttaattcatgcatgcacttaaaattaataccttttgtcgttaaaagattatcttcttttttcatctttatataaatatattttgactagtatgtagttattttaacttaaccactgttatggtaaaaaaaaaaacaaaaaaaacttaaccactaatcttgagttcaaactttagatatgcagtcatattaatacaaaaagaactttaccatatatactgatcctataattttatatatctaacttgcacactattatcaacgacagatctctaccaaaaaatataaatataattcgatagaaattctagctaagatagtctaaaaatttaaatgttgaggatttttttatccccctcccttccttttgaagtgtatttaagctcattcaactacgaattaaaaaataactatataaaaataatggatttttatggatacatttaaattatatttttactttttgatatatgatatcagattttaagtataaatatatcatataatagtatattttttttagctgttgcttaaaaatgttaaatcacaaaaatacttcctttaacaagtttaatcgattagtggtgtgcgtggtgaatattatgagaatatgcttgatagatattgagctgaactagctgtttagtagcagctagagtttttccttcttttttttttttttcccattaattagtttccctgataccaattttgctttcggctaggagttcttgactacagatagaaaatattattttatataataaaaataattattaatatgatatattatttattaatataaatttttaatgtctatattaatagattaatttttgttaaaaataattatactatcgagagtcgtagtatcaatttctttaatatatatattaaaaatatctttcaccctcaaaattctcgtttaatgtgcaaaacatggaatcagtgagctccaaggtcgatgttgtagtctttcttcatgccatttcgaaaattgtccatttaaccaagctcgattatataagaaatttaaaacttatttttttattcttttggattcatagccgaataaactatatgaagtgactgattcattgaaaattttgtttagaatttctacttattatactatagatttccatctaatgtttggaactaatggagtatttaccaacatggttagctcttcagatttcagacattttatatatttgctattagtgccgaaagggtactgacagaatatcttcagcatttgaggttcattctttttgtgcacctttgtgcggacttggtgtctcttttctgaatacatgtttctgtatgaatatacttgttctctaagtctgatcagattatgtatgttgtatgtccatcaattcctgtccaaataaaataaacaaatgcaacatatgcaatgtgacttttatggttaagaggtacgcatagttgacaaataattttattttttaagtatatcatttgatatttgattacgaagtttatatatatgaaaaatatttatcgaaaaaaatcaatttcttaaatgaattttcataactttgataaattaatttatagtgtaagtggtacaaagttcagatagaataaatctcattaaagattattaattctccaacaaaaattaattatcaataatattttgtatataaaataattttatgatcactttttaaaaaaatttacttgatttttaaaaataattagttcataatcaataaatcaacaattaacttttaatttgtaaacaattaaaaataaatacatatctttattaatcattttgatattatgatagctttggcttgtcttttcacaagcactccaatcttgtctatagtctccgggctctacgccaaaggaagaaatgatgatatataaatatttatgtttttaaaaacctaacaaacacatatcttatttttaatgtcaaatcatattatttacagtagaattgcaggaatggaaaaaccgtatgcatcaatacacaaaaaatgttttctttctcaatagatgtttgtgagatattgagtgttaatgaataattttctataataaaaaaagctcccgttcttccaacttctttctttatcagcattcttccaacttctttctttatcagcattcttccaactttattaaacacgtaacgcgacaaggctctagagggaaagcaaagaattcatatagatatagcatcaaaattcaaacacaactctcttgcactcgtgcagtctagtgcagtgtgtgtagtatcagagatgggtcagatatcaaacaatattaaatttctctcactctttgctttattttatatactctttgaagaaaaatattttttttgaaataattactagtatgtttacatccacaatttaataaattatatatttttaattatatttatttgttcaaattaaaaataaacttatttttttatataaaaaatactatatctgtaaaaagagaaagaaaactcttgatctgatttagggcccaattgaatagagggaacctcatgattcagttaaccagtggaaaaaagtttcattggtcaaagtggcagctttatgatgcacacatgcaccctaaatccacatgcttactcacacctccacattgagccgtggtcgctttcatcataccacacccattactctctgttttgattctttcacaatacaaaaggatgggcccactacttcaagatataggccccatctcaacccaattcatttctctaaaataaaatcatggactcatgaatagcatcttactcatcaaaataactttttgtgcataggataaaacagggagagtaaaaaaaccatcaagacatagtaactaccagcatttaaaataaaatgataggacacaatcatcttgtcgtacaaaattagctgcacctaatataattgaaatgattttaattaaggatgttggttaacaaacgacttaaagtatattgaattggattttcattactaattactatactctctccctctcacacgtttaggtattaaccactaacagagtttaatgaaaaaaatgagaaattgatgatgaaagaagatccagtagaagaaaaatgaagtagaaaacaattttttgacctaaaacatgagaacaatattgtttccattcacatgtgcatccacatagcgacaaattaacatgtcacttgtgtaattttgttactattaattgatgttatgggacaattatcaatggattgatatttcaggaatctcaagaacaactttagcctctcaaccactaaaataatcaatacttgatctttcatggaataaaatgattattactattcatgttttgttatttgtttcttttttttttcctttctaaatacaactacttgaatttatttctgtgctcataattaaatttgaaattcattcacttacattgacacatcatatataattaatttacacaaattattttcataacttattcttcaatttcaagctatcttctacacaatttattcatgtataataaaataaaattttcaattttgactgtgaaaactttttttaatgaactttatttaagataaatagtttcaccactatttgacgatggtgatattttttttattaattatatgttaaactttaaaagtctatctaaatttaaaagtatactttcattgtacaaaaaaacttgtccgtacttatagacagtaagtattaaatattgtttgtctttatataataaaataatatcaagaagtttctattattttctttgcgaatgtttaaagaacacttgttaacattcttgtaattttaaatcctaccatccttttctgtaattctctcaattattaactaaaacatattgaatgtttttaatattttaaaatatggaatatatttatcttttgtttaatattttattcatagaatattaagtgaaatatttaggtggtattataaagtataagaccccttatacttgcatgaaaactaattgcaaacgattaattgtacccaaaatgatagctattcttttacatttgtatttgggtaaataacttaactaaatacttattcattaaattttaactacatgagagcttaataaagagggaaaaaatgaaccaaaggaacaaagataatgaaaaaaaaagagtctaatagttatcgttattcattggttaaaatagggtcttaaaagacaaataaatggtcgacatcaatggaggttagttgtcaagatacagctccctcttgaaataaaaatggaacacatgtgaaggcccaatagccctttgcctaccaacctccacctgtctcttctacgcgtgcaagttcactgatttgtataaacaagtacaatctatgatacaattatttagtattttattaatatatattaaaattgaccatttttatataaaaatgagcactctttaatcatatatttttagttgttgaattttgacaaaacaaacagtcaaataacaatatcattttaaatcaatgatggtaatagttaatgtaactcatagcaaagtaatttgatctcctttacacacacacacaaatgaaattactaaactgagaacaattcacgtaagaaaagagaatcagtctgcatgcttaacagccttccttgtctgaatgcctttgtaaatgtaaaaaaaagggaggctccctcatgaagctaggattgaagaagctggttcgataagaccaggaggagtctttttattaaaagaaaaattattaaaaaatctaagagttgtggacaatatttggttatgaaattacatacacacgcatacttgttctaatgggtacacttctactcctaaatcggagaattcaatgcaaaatatttacacgtcctacaactggagctccaaagtattattttattagtatgcattgcattccacaatattacctagaggaacctacctaactactatatatagttgtgactcactcatagccaagtactatgaataagccattggtaaaatacccagtacgtatatatattctaaacacagctacactattgggtcaaataccaaacttgagtatcaaaatatttcgcaagtatttcctatcatatcacttcatcttataccaaaagattcttcattattctcattttttcgaatggaatcttatcaccatcaaagttgagacacaacattactttggtttttcttaaatgcttatattattattcagtgaatacgtagttattatccaaaatatacaaactagctgctcattttagtacatgtcatatatgaaaccaacaactatttcgacttcactgtttcaaactgctccacttttgttggtacattgggccaaggccacttttagtttttactatttacatacccccctagcctctgtcaccttgggcctatggctatactgggacatactttgtttttttggtcaagatgcttggacacttgaaacatttactcatgataatccatggaacttccagatcatagattgatggcatggtaatgctattagcgctcccatttccactttctaaccccattttttctgtgcttttgtgaaatttatattctatccctccacatcccctctttctatccctctcttctattctattcctctttttaagaagcccaatttctggaccctttcccataacgcgataaattgacattcacatactctaaaataatgggtatatatgtaccaggacaccccaccccacaaagcggcccaaataataaggtatgtaccttgatttaatacatatatacacaaatcacttttaagttaagcctagttaataaaaagaaatagtgtaggaaccagataaaaaaaattgaatgtattaattaaacttggataaaaattttataaatgatcgtggtgtttgagttcaaaagctggaggagcttttattaaacttcagtatcgaaaattaaggaccctaccgcgcgtgcacgggcgcaccatcggtggaggcgtggggtttctaaagtaattgtgtctccaatctgcattcattatgtagagtttctatttctacggtgtttatggtaatttcaaaatttttgatacggttagtttcttaatcaatcaaattatatggtattttttattagtaatttcttttgttttttcaaacttgtacttaattattatttttaaaattgtaaacttttttttaaattagaaaatatgtttaaagataactctaaaaatctcaaccctaaaatctttttaattatttttaacacttttataaaaaatattttgggatttatgatttaatttttttattgtttcttaaacataggtttcataaaaaaaaattgaaaataattaaaaatattttaggattcagacttctaaagttactttcaatcgtatttttaattttaaaaaattataattttaaaattttaaaaataataatcaaggactaatttgaaaaaataataattaacattatcacatataatttgatcagttaaaaattaacaatatccaaactcgaaattgttgggggctatagaaactcgatcttattactactattatgattgagaatgtatctttgtacacaatatttaagagcacaccatttctaaaataatgaattcaagaggaaattataccgatttatttggtgtaagtgttaactactttatatgtttctcattttaaaaaatatattttctttgttttttagtattttctaggacactttatgtatagtgtaaataaaaaaataaaaaatagtattaactaaataaaatagtataattattcttaaatttaattttgttctacgctttttatttgaaattaagaaattgtgaactattttgtttttgtcatcgttactgtcaatattaagtcataatcactgttatcgatattgtgaagggtatgtttacactttctaaattaagattagtaaaatcatacttttaatatctgtttttttatcctatatagatttcctctcaatttgcattgtaaataataacatatatcctttgttaatgcgaaaactcccctttatttcttatgtctttacatgacttgaaagaggttattttagtaaaatatcaaatacactttacagacttcaatacaagcaaaattattttttccatacttaaaaaattagttaattactattttttagttcttatattaatcacatttaaaaaaatatttttttactaaagttattagatataaaatgtcaattaattaaaagatacttttggaatgacattattaaataaagtgaaaataattaaattttgttcatatttaaatctgtaaaacttttttttgcttcttataattaagtagtaagacatataattttattaaatttaaatatattggatattatttattaaatggttaactattgactattatttattattgcatcatttaattatcttaatcaactttaaaataactaataacggttttctttggaggtgatttggttaaagagagataattacagcataatttttttttaaaaaaaattcatttatttctttactttaatttaaatatattttttaattctcttctatattattttttcacaatcaaacacacttagtgaaggatggtatgttttagccaccaggcttagtctccttttcatctgacaattatcattatcaatgaaaatccaattgtctttgactatctgcatggagtaacgcaatgtcatgatcatgaccgccactgtatcttggagttgaaggccactgatctgccgtcatcttataatcattgctctttacatggaagaattatgtagttgatcaattttagatcactcattttttttataattaattaacatattctgtgttgtggggcttcaatgctctgataatttttgtcccagagataccattaaatgcttttcggaacagttctattttctattgtaatgatttttatatttatcttaattataattcttttcatcatcctatttattatatttttttcccattatcctgatttctaatcctttgatctcttacaaggtgtatatacatgtcatggactctttagaatttatcatcaattgactaatatattataataatgataatacaaattactttttattttaaaaattttattaatatttttttctatcacatcttaaatttttttatacttttttttctctctcctaatgttagatagcacatattaagtgtcatctatcaaacattttccattactagataagagattttatacttacaaatatgaagctaaactcattctacatattctttatactcttttaactttgacatcgaaatgtcttctgctaggccgttgccgcttggcagaattctctccacatctaccatgttcaaaaaataaaactgaagaatatatatatatatatatatatatattttttgaacatggtagatgtgatatatatatatatagaatgtaatgataagaccccattaaatgaatacttgatgcgagtctataagctggttattaattatgcagttagccaagccagctagcatgaatgcgatgaaacaacaacctgacactaaccaaaatccagatcatgagaaatgctttttcactgcacatgaatacttgtctgcggggtttctttcttggtgggggcatatgcatgcatggcagtggcaacaacaaacagatcaattagcagaagaagtttgggttatgggaccgctcaaagaaccaaataatcttagccataggcacatgacatgaaacgcacacaaaaccgtgcttctttggcttgtgctctgcagattctaagctagaaattaagaacttctttctttcccgttaacactgtctaccacttgttctcttcgttgcactccgaaggaccaaaaggtaccagtcgctttcaaccaatgtctccatagaccagtcgtgaatgacttgtgggacaactttcatttggcatggttaggattattattaatacaaatagttttcttacatctataaaaatgtcttaaaaatataagatatttaaagtgtgtatatatcaaatgtcaataattaattacttcgtccaacttgatatatacgttgtcgtcgtattatattgtttatatatatgagtatccttcaaaaaaaaaattatatgagtgactatagctagcagcgttgtttcaaattttcaatataccaaattgaatatatatgtttcatcataacaaatactcacgatccaaaagtccaaattgtagtaagtctagttcttgtcttttccgtatttgcatatgttttaggtggctgttggctttcctggttaaattcaaaaggttatcaacttaaaaacaaatattctaaaattttccaaacaataagcattcataattttttagtgggtattcataatttaagacatattattactttctttaatctcaataaattaagtaattgaatattataaatagaacaaataaagtatttactatatgtacataaagctaaagttaatgtttacatatatgtttattgagtaaattatattcatatttcttgatttttttttcttctaattgcacacaatattaatacttctccttttattatccctacacaaattctttaaatttttcgaaaaataatacactaacactcttttatatattacactaattaacccccttaattgtttgaaaattaagcattacattgtgtatcctcataacaaaggttgttgtaaacattaaaaaaaaaaaaaaaaagattatgtgaattctcataaaatcttaagagtgtcagtatagttcactttactatattttgccatagatataagaagaggttcccggggataagggaaaggtgattacctcatcctcactagaagtgagagatctggaaccaaacacatacaacttggtgagcttgccacataaacctaaaacatttgccaccaaagagatgcaaaagccactaaagcgtcatcatagagattttacaataccatctccacgacctcaagcaaggaccacctacaatgagcattaaaatgatgcccaatccaagtcaactttttttaaggtggaaatgaaatcaactcaataaggttatgttgagtttgaggatgagggaactgaaatagacaaggaggtagctcaagactgagaggaaaaagtaccttagcataaggaagaagtacttgagtaagatgaaaaactaccccagcgtgaagatgaagcaccttagcaggcaaggataactataccctaactcactcaaccctttacgggggcaagggtaaagaaagccaaagccacctcgactcgcttcattgttctacctaaggaaaacacaaaatgatcatctaaattcccacacaatacacgttgctaaccataggtgcgtgggtgacttttgttaaagcttgcgagtacgtaaaagcataattcgaagaatgccatctaccaaatgaaaagaatgcactttgtgtctaagaatggggtatcgtggtcatgttaacaaacctcatgagcggtatttgtacctatccttttataatttattatatatgtacatagattttattataatttgaatcaatgaagtttagtataatagaaaaagctagtcttttacaaagtgatggattatggtttgaagtagagatatttctatttattgttcaattgtgtatctaataaaattatatagaatacacttgcataaaaggacttcagttaaaaaaaaattttaaaaaaattgattacaactttaaagtaatatattttttaaaaattaaattaaaaatcataaattttttataatttcaatttaagaaaatcaaaaaatatataaataataattaatattacgacttctaactcaaaaattattatatctatttatatttattatttttatgtcggtaaaaatttaaaatacacactcaaataataataataaaaaaatccaaatctaagaagtaacccccaccccgctgtgcagcaaagcaatgtatgcgtgtcagacattgaaagagctttctagctagattgaaaatgacagtaggtgatactacgacccagtcaaaagaacacaaatttttacaattaccgattttcttttattaagaatgattttcaacacatttgacgttgattaagggaaaattgtacaagtaccgattgtataagtactagttgtaggactcgtgaaatgcacacttaatccatgactattgtgttaagctatatatttaataaaatttatttgcaactttttggaaaacatgttatcttttgcaatctgtggctcagctgtaatgtttatttgcatatttgtacaagtataatgtttatttgacatgtataatgcatctcctccaagtaaaataaataattaattaaaataacaaaactgataaaaaaaagatataataaaagtgaagggaaaacaaacttttactttgataataatattttatagcaatttttataattaagaaagagataggaaaagaaaaaaaatactagtataacagaaaaatataaataagtgttatataatatagagtttaaacttaatgaatgttagtgtcatgattgcttacgtaaatctatttttaaattaatttagactatatttgaatttttatttaaaatgcgatatatgaattctaagaaaaatttaatgattcacaaatttaatttcatttaaaaaagaatctaaatgtttttataaatctcattttactccaaaattctatttatgaaaataaaacaaacatgcatttaatctcatttcttcaaaagtgtctgcaaaccaagtttaaccctaaacccaacgcatcacacccatataatacgtatacacatatattaacgggctcaaaagcttaatgatttgaccctctcttgcttacgttgcttttacataatgatgcacacaatccaccaattatgtgtcttatcctatatgtgttactgttactctctctctctccagtccccacccctgtgagcatggtcctgcaccagcacacacaccctgataaataaatatagagctgtattcccagtataatggaaactgtgcaaagcaaaccacagttccatcattggcctaaacccatcatcgcttcctcaaaccactttcttttccctcctcggatgtgttctagtatatgttaatttagaaaaagtagttagtttcccttgcaaagaaaaaacattgtatatatatataaaaaaaaagtgtattcctagagctaaggaagcaaactaggaagatagctaagataccctcttcctgcgtttggtgtggtcctcgttatttaacagaacctgtctagggtttctgtccattggaaattgcaaaatctgcatatgtaaacatgttcccttccactaattacacctcctcaggctcttaccctcgtttcccttcatcttcttcttccacttcaccctatccttcttttactctccttcatcctgaaaattcttcttccagcaacaacacctttcttcatgatccacttgctcttacctacataccctctcattaccatgctccaatcccagaaacactagccaattgggcagtttcagattgtgcaatcctgaatcaggatcttggtggtgccctttatggcatcaccaagaaaccagtgaagaaagcaactaagaaagacaggcacagcaagattcacacttctcagggtttgagggacagaagggtgaggctttccattgagatcgcacgcaagttctttgatcttcaagacatgttagggtttgacaaagccagcaacacccttgactggctcttcacaaagtccaagaaggcaattaaggagcttactcgaagcaagcagagtgttgaaagcttcgaattctcctcatcttctgagggtgaagtggtttctaatatccaccaacaagacctacaacaacaacatggggtagatttggaaaatgggaagttgaaagaatctgcagcttattgtgttaaagcaaagatgaaggaatcaagggaaaaagcaagggcaagagcaagggaaaggactagtagcaaggtattgtgcaacacaagtggcgaagggaaggtgcaagagttgaagaaaaagtgccctgcaactgaaaaccctcaaatcctgaaccagttaaggtcaacccttcaacctcaacctcctcatcctcaagatgtgggtggagaagtaccaagagatgatgactttaacgttatcgaggaatccattgtcatcagaagaaagttgaaacacactttgatgtcttccaatattcatcaccaaaacgctgtgatccctaaggaagcaagtgtaaacaacagtgactaccactccttccccaatttgtctccaaattgggaagttaataatggtgccaatggacgctccaccttttgtgcaataaccagcatgaatctatctacaggtaagtgtttctttttcatgaacaagtagctgaatttattttccattgaaatcgctttgtgatatctttgtgatacttacaatcccatgtattgatttttagggcttcaaatttttggaaaatcttgggaggagtgcaccagtcctcatccaagctaatatgttagttttcagaattatccgatgattgtctctagtgttttgccaaggaatatcatggtcatgaaggcatctttctgtgtttttctacctgtaacttttttctgtcctatgtttcctttctacaatgtactgattttttttgttgctctagatcagccgagaagggcatgtgacagtttggcaaaaaaggatgctgcgtgtataatttctgaccaatatttttaatgtggctgatattataagggtcaaatatatttatcaggaaccgtcctttcttttgctagtagatttcaatttttatataatcagtttacgatcaatatatattgattaataattgttgaaaacctttaacttagctatatcctttggtcattgtaagagaaggatgtgcagaaaaaaattcaagatattttagctttgatttaagtacagaactatacatgttagaaatgcatctgctaatcatcctgtaagaaagtttccgttttcaaaattttcagacaataaattcatataaatatattcataatttcatatatagtataacactgaaatatacatgaaacacacatggaagaatgtaaattgtccaccttaaattttcacaactgatacaagaaaaatcgtacaggaatgtcgtccaaacctagagttattaatttgtacaatgtaagctgcttttttatatttctttaattttgtacaagatgctttttgcttaatccaaacacactcttttgttctaacagtttcaagttaagagcctctgataattcgttttgtttccctattgtaaatttattcatcttaatcattgtcaatttatataatatctgaaggcttggtggtataagataatttgctaaatgcatacaacagttaaagaaacagttaaagcaatagagaaacttcaatcctaatataattcttgagccttgctaacaagtatcataagtatatttttttaagaatcctttaatacgctctatcaaatgatttcaattacttagaaaacaagtattaaatgattttgatatttttaacataatttagttgttcctctaaaaaaaacataatttagttgtttttattataaaaaaaatatttccaccactgtcttacatgtgaatcatcatcttaaatccatgcaatttataagtctccattttattggcacactttcactaaaaaattgagaatatttgtctcttgcagagtccatacacaatagtaattttttattagctagaaatatctattgtgagagaaaatcgacaacaatatgtatttcttgatggccactttgagcagggtaaaggatgatcttataattatttatttaagtttgcattcgttttcatctttttgcagcttatgtaagacttggctgcatcaagtacataattattgtaacatctctttctcacagagtgaactgaatttatgaaccactatgatatattgtcagctacatattttgtattctaaccaaaaaatataattatataggttaggacttcggagtccatgcacacaagacttaacaatgactttgtcgatcagaacctttttaaacattatggattgatatccagcggtggacaaaataaatattcaatctgattaagtacactacacccttgactggctgttcacttataagtacaagaaaaaaattaagtagctaactcaagatgcaagtattcaatctttattttgttcacttttattacaacagcagcaattctgcttactttctttttgttatttaatttctcttccaatcattaataataggttggtaacttcaagaagtgaaatgtacttagattgctttagcagatatattactgatgtggtactataggcatttgtatttcatgttacaaagacaatttaattgtctgacaggtcagatagactactttttatattgctgattttctacctactggcagcaactggttcatgttttaattttcttatataaaagaaattataaccatccccctaactgaatctggatcacattcaagaactctcaatgtggactttaacatttcattgttaagtacttggcctagtgtaacaaactaaattgtgggtggttgatacattcataaaaatttctagccatctatctgggttttgtagatctaagtaaaataattatatcagtggaagccttatcgataaatttatttgccacaccaattttccctgcatggtagttgtagcactgagctaccatgtaatggaaactgcatagttctaacaagcaaaaccactctccaatcaagatttcctgtaatttaattagtatagtttgcgtttgatggacaaattagggcgtccaatgagctcacaggcagtgttcaaagggatgcctgtaacttttctagcctcatacaaaggtattctttaaattatttattttttacggcaaagatatattcacacatcagactaagaacatagaaagtggttggtttctgtaaggaaattataagagaaaaagaaaatgttcacacttaagagtcacgtaaacatgttctctagatatatcccagctaaaaaggtctaataaaatattttagacaaccctagaaagctatagaactttcactaggtggaaattaggtagaatagaatctagcataaatgttttttatataggtagaactcatgtcaatgtataacttccattgtttgtaactcagaattttaggctagtacacttcaaaactagatctgaaattttgctgaaatccaagagaaaagaaaatataaaggtttatagtggatacttctcaaaagaggaaatttccttcaataattaaaattttaaaacccaagagtgacttatcaataaattatattcatttttttagtaccacatcttaaaataaaatcttaaattatcgttaatttattatatgattctcactttatcaatacactttaaattgtttgatactacaaaaagtgtgtacaatcctgttagaaattaagaacaatataaaatatatatatataaatatatatatataaactatcagaggctctacgctatgcgcaagtaaggggaagagatattatatgcagtcttaccattacatatacaaagagattgttttcggattcgaacccatgaccaacaagtcagcaagacacaactttaccgttgtgccagggctcgccctcataaaaaggagtgtagtgtgtaaaaaaattagaatgcaaaaaggagtgtactcttacataatcttgaggcatgcattttactatttctttttgttactgatttatggtcatcatacttgcacactggtgcttatatacttatttttcacattatctcataaatcattaataacactcttggggtctaataagaaaccacatttttttataataaaagagaaatttgactattattattagagtagtacccaaagaagacacaaagaaggtattttctgtacataagctaaaaacatgaagggtacgtggatatattactactaatatatatagaaaagtacttttttttaacacgcgtacattttaatatctcattctgttataatatcgcagtttgagaagtattagcttgtttgtagacctttgtgaagtctatagttgtatacctctcacagcaaaactactttccattaccatcaagcgcttgtttctttacaaattacataactcaacttgcccctctttatattcttttttggtttagttccactagtctactggtatttctttttatgtctctatacatatttgtcaatccacttaatgataaagtagcatttaaggacttagtttctatcaaacgtttccatgtataagtactaattagagaagaaaataagaataaaataaaataaaattttcaaaaactaaaataagttcattaaagtataggtgtgaaagtaaaatctcatattaaataaaaatcaacaagttgaacaatagtaagaaaaattcaaaattttaatatcttaagattttttattaaaatatactgttaaagtgattgtgttcgggatctattagtatagatcttttcagttttctatcccctcaaatttaagcagagttatttcagcatgtctagctataattaatgcaagattgtcgactagatggaaataggacaacattaaacatgtcatgtatgatcaggatgtaacatctataaattctaattaacatatacctcaaaacatcgatattagtgacatgatcaacttaagatagatcctgtttaaggcaaagcaatcttacatgtgtaaaacggggtagggaagtgggaatgtgcttaccatgcatatataaccgggggcaatcttcatcagattattcataataagtactgtttttgttggtttgtcagtataaatatggctgaatgaggtgtacgttgccagaatgctgttttgaaaattataattcatgaatatagcttagtatggagagttgaaggcttgaagcaattgactgatttcactatatgaagatatatattcgtacttaacttttgcatatattaattggaacagggagattgccaaatattatgtttgcgacaatatagtgctattgaatgcatgtgaaattgttaggtactcaaaggtaaggatggtgattggaaagatcttatagtcaccgtaaatcattagattactattgctagctcctaatgtaagtaagattgcatcctacctaaccaccaccatcatctatatacaaaatgcacagttcgattgtacttttacaatataaaatcacactcacacagatggggaacgataaacagcaaacataaaacctatcacaagggtaaaaacaaggtcttaattaactgattaacctatattgtaatattataatgtaattaaaaatcgaaaatacaatttgatcacactgatttcaaattatgtaacattttattaagcaggaaaccgaagacagtgacagttaatcactagtaaaagcatacaactgtaccaaagtaactcctctgcacaactatcaaattatcaaatagctagtttcaacttttcttccatgtatgtgtgccgtttttaaatttaatcgtactaatagtttcaaagaaaaatattaatttgctcgtccaagtgtttaaaatagttttatatttcttatttaatacatgtatcatccttttttttaaatggattcttattcatataagggtttactcatactattaataaaaatcgaactaaaaatgagtatggaataaagtatttttagtaagtatggaataaagtatttttagttaagtaaaaaaataaaaaagataatcatgattgcttaccagatggcagtgatctttatacatggctcgcttccatgttgtctcctcgttctatcgtcaaaaagtcaatatcttcacctcaaaagtaagagacagatttgcagtttggctagtgacgaaaagtaagacaaaatcgtaataattagaagatctttaaataccatcaaaccataacagcatatataacagagtctgcgcagtgcctgataaattagaaggaaaattattgatggatactttggtttttgaatagatggatactttgggttaatctacatatataagaagagatgaaaagatagaagagaaaacaaaattgtagatttaaatataatgtaataagaagaaaatatagtgccaacgagatgaaaaatatactgtgttgatgtgcatatataattatctaaatttaaaatataaggttgagcaatacacacaaaccacacacatatacatatgggtagttataattaaaattagttaaatcacgtaactatttaaattaagtatatataatcattcaaacatataaattatttctaaatttgtaatttttatttttcatattaagatattcgtcatttctttatttttaataatgataaatatatattggcttaacaagtggtattgactattaaactcaagttttaaatatataattacgttaaatatttaaaaataaaattttatctctgataataatattatttggcttgacaagattgatcgaataggattgacttttgatgagagaaattattagatggtttgagattattatatatagtttcaattaattttcatatgatacataattaagtatttttaattaattattttttttatgaattggaaaacttgaatacgttatatgtacaaggaaattgcttgaggttataggcatgtggttacctagaactacctagaggatgtacatgtgggtttttttattaaaaaaataaaaataaaatgacaatgagcttgtcaatttcatggtgcaaatggtttattctttattttaatacaccagccaggttttaagaaacaacttgaaagggtttcaatctttcaggttatgaaatcaacaaagagtaaagactcgtacagaaagggagggtgggtgggggataactaacaatcctctggtaattttggatcccttatcatacacatcatactgaagaagaatgtttctaacttcatcgattaacacttcatacattataaacaaagaaacgaactgaatttttaatcaaatccccaaattgatgaaaataccctggtaaacccacatccataagtagaaaatgaggcaaaataaacaatgcaacacgattgaacaaccagtatgtagtacgtacattatctaactatagcctaaacaattaagtcttcacagtctcacacaaaacaaagtaagaaataaatttcttaaacaacaatatacacatattgaaacatagatcagctggtacaatttaacaaagaaaaacaaattaagcgaaaaagaagttaaaatgtacgtatgtagtagtttacctacaagaagaacttgttgaacagaagcagcataatattcagtatggaagcagctggtacagtacgtataaataacctcaagagaaactcctggaaaaaacagttaaaaagcagaacagtggcaataacctcgagagagttagagttagataaagatctaattaagcctcagcactagtgagagataaaacaaagagggtactaacagtaacaggtatatagcaaaagaggttgggttacttctatttgcagaagtgttcgattccagcatgttttcgtaatctcttctgcatgctactttaataataccattactagcttaggttctgccacaccctatatgatatataggaaaaaaaagtgagtgttgttaaagagagtgaacttgaggatgattcgcagtttattattattttatttatattataatattaatatgaaatatctaacttcaaatatgataattaatatatataagaaaatataagtgcataaaaaataaatttttttcaacacttatttcatattcaaaatcacaatttaaatcttgaagaacttaattaagatacataattcatcatcactacttatggtcttatgctaccaagtgttggtcttttgcaatttattattactaattcagaaaaatatatttatagctatcatcattcataatgatgatcagtgcatgtcatgaagataccccggtactgaacttgtacgtatgtctctctttctctctgggccgtatgtaacagcaataaaatataaattaatttgctgcaaaggtgttctgatgaacacagctatggcaaaacccattaatattatattggggtgaaaatcatcttcttagatattactctgactaaggttcttcagaaatttcgaaattggtacgtttacatatatgcagcactgtctcattggtttgtgtaagctagacgtacgtagttcatgacccatccctatcttcagctatttttctgggtctcatgtgaattaggagaatgtgaagatcactagctcagctaacgtaccccaccttatatatttatcactctttacctaatccagcttacctacctacacaccttggttaacttttacctagtgaatacagagttattgtcactatttattcgaattattacttggtaaatatgcatcccagaatcacctttacacacaaatttcctttgtttaccaagtttatatcaatggattttcaatccacataactttcgtatgggattgctaatattgagatttcgaaatcatatacaattgtaagtatttgttttttttttttttgtcttgaattgtgctataattcgaatccttaaattatacgaacgtgactagaaaattaagaaaagtgcatgatattcatatgtcccatttttggtgtagaggtagaaggacttatctctcaccaaaacgtattgtaagaatttgatatacatgtaactttgaccaaaaagaacctagctgctagccaccgtgcatatcctttatttaatttattatggacaccattttgtacattaattgacagcaattatatgctacatagtagcttattcttctttgactgtcagagagacaattttgaccaaatccttgcatacgttttggtgtacaatacaatcctttcatacgtttattaaatttagaaacattaactctagctatctatattggccatgatgaaaatttcctttaagattcactattaggaaagccaaaattaatttaaccaaaactactcgtctttttaacggttttgcatcggactctatatattgaccattggacccttcgttacaatcatgactgagattctagtttgtcagccaatacaccagtacaattttacagtgaagtatatatgaatataaagatctaatcttttttacgataaaacaggataagggaattatatattatgtgttttaatattagttttttcggatttttgttgtcaactagaaaaaaagtgtaaaatattattttactaacttaattattattaaacactccattagtcaaaattaagaaattttaattttactaaagaacaatgatatatgtacataaataaggatgaaaataagaaaaagattggaagaaaaaaatagagaaaaaagtaatgaatgtgataggtgatataatataaaaaaagagaactgtagagaaaaaaggaggtgaaattgtaatgaaaaagaaagtaaatgaatgagatcatgagctttatttttaagaaaacatgaattgtcatgcaattgttgggataagaatgcaggaatttcttttcgtactccttttctctcactgtacatccttttttttttttacaatctgaaaaaaatatttggaatatacaaaaataatttcaattgtttttcttaatatgttaaaaaaaatggatggaagtggtggaaaaaaaaaatagaatcaccctaaatatgttgttggtaaggtccagtaggtcgcatacgaatggcactagagcctcaatccagagaaaagtatgggcctgctagtaatcctggcctttgacaagtaatgtaagctaaaagtgaaatccaactatgaaacggtggacaaaagtaaaaatgagaaatgacataatcttttgacataatataagttaaaaaatgcaacaaattaaaccaaccaagaacttcattaaaaagtactactataataaaattattaatcagtcaaaaatataattattaaaaaactaaataattaaatatttcttaacttacaaaataatgtatagcatatatatatatatatatatatatatatatatatatatatatgagctaaaaatattattttattgaagtttaagcttttaatttgtgctgatggattagttttgtattttcttgaatggaagacgattacacaaaaacttgcttattgttgaggaataaaatggtatttgtctctacacaatatgataatgtacaatagtcaaattaaggaccttcaaataatgcttttttgtgtagtcttccaccgaagaaaatacaagattaggtaatgctcctatgacatattaatgtgtatggtctaacatttttttaaaaattaatgtgtcacttaaattggctaaaaactaatgaaccagtcaaaaatcgataaaaatccgatagattaactagtttaacccatttcactaattttttaaaactttaaaaatgatttcattttgtttttttaaaagaaatattataagttatgaacctttaaagtgaagtttattttatattattaataatttatgtatattacgttatttttttattatttaaatattatattaaaatattaaaaaaatattaaaatcaaaacgagagtgtctttaccaattcaataatcgatccgattttgacaacattactgaaattcaaaagcccattgtttttcttaacaaacacaccactataaaatctttccaaggtacacacaactgttcaaattcctcttgagataaggtatggcacaacaggaatcatatgcctttttgtttggaagatacataatcttcaacctctttataccaataattctttggtagtttctcattacctccatctcgttaagaacaatatctttcacacgcttaaacaatttttcttcaaaaagaaagagcattcttttaaaattttacattttctttatcataaacaatgccataggccaataccacattattcacagactgaaccaagtaattacctgctacatgaattgtaatttcgacctgtaaaatgtgaaagtaagaaaagaatgcctttctcttatataatttgacattactgcatggctccgacgaattcatattattacaatccattattttcctaatgacacttcgtttattgggattaaaattggtagtgtacttgaggataaggtaattgaattggtttttagtttccttacagcacaaacataaaattaaaattcattactgtcacctcacctgagactgaaaaataatactactagtataaaaaataattgactactaggaattggaaaaggcagtacgtgatgtgaaggtgtaattgtgctatgaatttattcaaatgtcctggaactcaagacaaaaactattacaatgtattgaaaatacaatattaaaaattaaaattccgatgccgggaatcgaacccggatctcctgggtgaaagccagatatcctaaccgctggacgacatcggatttgttgatgatgcttacgtgactttatttaagttatctaccttattttgatatttttttatagcaaaataaatccttgaatgaccgaattaaaaccaactaaaacttttaaaaaaatgctactttgtcaattaaatattactaatacaaaatatcacattaattatgtttttttataaacaacaaaaattatgtctgatgtttataaatatatgttttatcagttaaatttttatataagaaaatataagtattaatttaatcaattaatttattgtgtctaatgagatatatcttctatcgaagataagatgtatttttttcttaatcaaagttatttagagttttttatttgacatttaattaatgattttttattagattaatccattttagaataaaatgatacttttaattataattttatgctcatatcaaagaacgaacttccttaaagaatttaaatgtcaaactatttattataacagctattgattataatttattttttaattatagatttaattataatctttttgcaatcgataaatatacggaagttttatttaacttttaacaaatttttctttcctaaaattgataaattttagaatgaaatggtatgtttcatagttaatttaatgatctatttctaaataaacttcttctaataccaacaacttaactcatctaacatgtttataaaattattttagtttaagcttagaagtcgagtgtgcagataaacattccatactcacagaaacaaatttgagtgttacagtgtctgatacctcaaattggcatttgcttttttcgaaaagaaaaataaagataatgttgatcataacaaactaacccatattagagtggatgagtgagactggagagtccagtgtgagacccaagttggaaaaacgacaaacaatttcccattttctcttcttttaattttttttcctaaagtttctttcctgcttcaactttcctttccaacatcaaatctcgctcaaaaaaatttcccgagaaaacaaaagaaaaaaaaaagccttccttccttccttccttttttttttttctttttcctgccacccaaacatgataccctccgaacattattacccaaacaagacctaaccactttttcggtcatggatgcgcgtcgtgctccacgcgccgtcattgaccctaaggtccgtagggtcgggttcttcgctccatccgaacccgacccgatctcattcgaagtctctccctccgccaactccctctcgccggtaatgatcccaccgccgcgccatccgtcggagaatctcggtctccacgctcgtccctccgcgacttccccttctggcgacgaatccttcgccgccgggagctattccagctcgtcggacttcttccccgctccgatgtcgccggcttcgtcgtctgattcgagcaggatcgtcggcggcgacggagacttcttcgccggcgggaaggcggcttcttcgtttcctcgcggtgggtttgacttgacggcgacgatggcgagtagcgttccggcgagcgaattaaccacggtttcggtggtgaatgctgcttccctttcgattcgcggtgaggctttgcttcttttgcatggttccgttatttgaattggtggatatgctttgaattggaagtttggaacttcatttgtgaaagtaaaaatgaaattgcaactaaagagcgttggtggattgattgaggtttatgtcagcttctttaagttctagatttaacttttgataggttcttcttcagtgcaactcagctctacagtgcttatcagtagcaagaaaattttacagtatagtttagcttacgcctcatcggatacgcctttaaatccaattttgtttagagttattatttgatgttttagttcatgcttgacttcaatgatgcatgacagaaatgttgtttgattcaataatgttacaattttgtttaatatgaccacattttttattgctagtttacttggtggaaacaattcttggttaggctttacttacctttcggccaaactccggattagtcagttctcctgatgaaccggaagattaagacaaaaaaaagaagtctactggataaaaaaaaggggcaacaaactaggttttaatacaagtataattcaatatcaatgaataacataacttagtaagtaaaaatacgcaaagagaagtaataataattggttttgtgatagatgcctatttgttgctatttaaatctaaaatggttcacaaacaaaactaattaaagcttttgtagtgaaattggatctaaatcatgtccaagtgaaacccaaaataaaagggtaaagtataatgtgagattcatgtaagcgaactatagctatagtagtacctgatgttttgtatgtcctgtccctgtggctactttccaggagtagccaacagttaagtgactcaaattatgtttaagaaaaaattcacaaaatccacctatttctgtgccatgcaattatcagttttctggtttttgatactctatgctcactagaaaagatacagttgtttataaaaaaaagttgcttgtgtttttcattcatctgctatattgtccagtcggaacatatgaggaataattgtcgtttcagtccgacttacttattgtcaatgtattattgtattatttgtggatgtcatcataagatgctccctctggttgtggtcatcttttttttcttccttttatgatttttttgaaggaatcttggacaatcaaaacttatgattaggcatggtttggtttggtatttaatcattttctctaccattgcccccccccccctccccccaattagaaagagagaaagctgacaaaggaggaggatcagcagtggaagtgaaagaccaagctctgaatactaaacagcagaagaaagagaaggctgaaagacgagctcttcaagaagctcaacgagctgctaaggctgctgcaaaaggtgtgtattatcatttaacgtatacttgtttgaatgggattagtgcaatgttgattttgattatttaaggcataaaaaaactcttcagctagaactcttgaaaattttaagtttctttgcaaactcaaaaagttaattgaagcctgtacttattattttacatttcccattgaaatgttacacttctattatgttggtccttggacctagtttcttattcagacccactgtataagacctaaaacattgtttttagcaagcctgaatagggaatttatgatgatatttcacaactcttcttttctaatctattcactgtgactgacactgctaattagtttgtgcttttataatgagttgttagctgaaggaaacaaggcatctggaactctggcttcagtaaatgtaaaactagctaaagctgcaaagcccccacagaaagttgataatgcttcggttgcagcctctgacaagaaagggggtgatcgcccaccagaaaaagatagaaagaaagatgttcctcaaccacgtctgcaatacgatgataagagcagagtggagaaagccaaacgacgtgctgtggtaaaacaaactgaagctaagaacagagttgaactgttcagacatttgccccagtatgaacatgggagtcagctcccagatcttgaggcaaagtttttccagctgggtcctgtgcatcctgctgtttataaggtggctatgttattccactgtttaatcttgttacaattcatgtttcttgtgtgctcaggtcgggatctatcatttcataatatatgtgatgttcttatggcattctcatagctcaacaattagataataccacatgataaatggtgttccttgcattatatgaagttcaaacttgaaaacagaaggactcagcaccaagttaatttaatttaacagtgttcaataccgcctagagtgaaaaggtgccaaaaagtcagcgtatgagaggtcatttattgtattcagttgcaacactttctatgtttaaattattaaatggaaatgggttctttatgcctagccttgtgtactatattaaattataatagtttcatttaatacaatttcagcacttaagtctcttctaacatttcaatttcttgctttagttttcaacttttaataaaaatttcattgctgaaattttaatgcatcacatccactgctagggtaaattctacactatctccaagcatttagttatttcacttgcagttaaagtttcaaacagtcatttagatagtaacatcacatggttcgcaggaatctaaacattttaaagttgacagttgataaaaataaataaatcctacattaatctgtgtggtttacaatgatgacggcgcaatctcttaccccattggttatattttggactttttccaacactacattgctgccttcatttctttggttttgattttcacaagagggagtcaagtggaagggaggaaggggaagttatatgcggaccaagtacgacttgatttagtgtaattgtatgtttgaagcaaaacacttaaaggttaaagcaattatctattccatgtctcatattacaacaaatggtgaaaaaatgttctcttctggttgcaatgtttgtttactagaatggctaggcaagatgaagaatatgaaataacatgagttacagtccttaaatttgtttcactccttacaaggctcaaaatgatttcatgcctcttttattattattgcactgctttgtcttgcccattattctatttgaaagttaggaagttcatcttaaatgacatctaaattgaaaataaattgcactaggaacctattgtatgcatggagatactatgagctgaatcatgaatttatcattaaaatttatttatggtgttgcagtggatactggataggttagtcattaagacctggttcaatttgttttgaaaatttggcccttttatatgtattttccttaacctttttaatctttatgatgattatcaggttggtttgcagtatctgtctggagatatatctggtggcaatgctcgttgtattgctatgcttcaagcatttcaagaggccatcaaagactacagggttccatctgagaagactcttgtgagagacttaacagaaaaaataagtagttatgtttcttttctcatcgagtgtcgaccactttctatcagcatgggcaatgcaattagatttctcaaaagtcgaattgccaagctaccttcaacgctgtctgagtcagaatcaaaaacctctcttcaatcagatattgaacattttatatatgagaaaattatacttgccaacaaggtgatagtcaagcatgctgttacaaaaataagagatggtgatgttcttcttacttatgggtcttcatcggcggttgaaatgatactgttacatgcacacgggttaggaaaacagtttcgagttgtagtggtagactctcgtccaaaacttagagggaaacttttgcttcataggctagtggagaaaggtcttagctgtacatacactcatgtaaatgctgtttcctacataatgaatgaagttactcgagtctttctgggtgcttcatcagtgttgtctaacggaacagtttattcaggagttggtactgcttgtgttgcaatggttgcccatgcattccatgtccctgttttagtatgttgtgaggcttataaatttcatgaaagggtacagcatgattccatatgctcaaatgaacttggtatgtaaacaacgacagctgacgaggattgtaccgagctcttgccttgtgtctggaaaaaaggttgatgcttctctgattttcttacaggtgatccagatgtcatttctacggttgagagtagagaggatgtcaaccacttggaagcttgggccaatactgaaaatctgcaacttctaaacctgatgtgaggcatttttatttgcataacacaacgccaaattgtcatttctttactctgaccctgcagttctctatattgatgccagctatgatgcaacaccttcagattacgtttccatgataatcacagattatggcatggtaagtgctggaatttaaagatttatttagttgctgctagtagatacctaaactgtgctttataccgggcacccctatgttagattgttagtatggattctatctcactattttagtagaatgacataatctggactaagataacagtttagactaagaaaaccaaaagggtaaaataaaataaaaataatcctaaatattaaaacaagaaataatagatgacattaaaatagtggacgacaagaatctaaactaggttaatcctcataacaataaagccctctatctctggtaaaataatgtattttattagtcttaaaggagcattttcctttatactttttaacacttagtcacgattgttactataatactattactaaatataaaagatttaacaatttaatcttggcaggtcccacccacaagtgtacctgtaattgtaagggaatatagcagagaacaggtgtggatatgaatgcttcaaatgtggatcatctcaattttgtatgcatgcagcgaatccctattttaggaataattttgtaaagtttgggatgatgcatctttctgtatcattttcttgtcctggaataatgtaacggcccttttgttcttttcgaaattttgatcgcttgtagattcacctgtcgcagtgaagagtagggattgttgcttctccagacagattttggccatgcagtctcacttgaacatttttttttctttttctttttggttctagtggtcttcgaattttggatagttgctcagtcagttttggtggttattattctatacccaatttttgatatctttgattataaaaaccatcaccatgagttactggtgaaattgtcactgaataattttgtttcatgtgaatgctttaagtgggatacatagaaaaggattgcatgaaaacgttagccaaagcagtcacttcaactaaatctgaaatttctattaaacacattgccatggtatatcgttaggatggatgctgtttattgcaattccatattagcttgcggggatgcaagcatacgtggtataatcacatcatcctaatgtatagctatacctacagccataaatatgcctgaaattatgagctatacctacggccacaaagtgcttaaattatcctgtgggaaagttacgtcgaaaatgaaatgattgttatcgacttatcagaaaagactgcgaggccacctcttaaattcattacccatgtgagaacgagatgcgcaactacatgtccaatcactcactgtcacaatggttggagtcgctatttttctccatctgggtctaggagtctctgtaataaaatgattgaagttatgacaattggctgggtttaattggtaagtgtccagttttgtagaagttgttgatggttgatgtagcattaggttggatactcgtggcagtcccttgattttggaacgtcctggtctgtttttcattaaataatatcaaaacaagtgttagaacttggaacaaagagtgcccttaattaatgagtgctctagaagtataagttaaagagtataatacatgtcaataataaattattgatatttaattattttgagaaatattaaatctttttaagttcttaagatattaggaaaatgtaaatatagtacattattattttttgaatttcaaatttattttgtattatgttattttttattaaattaaattagcatgcaattttttcccaaacaacattttgttgggatttatttatcttgatgacacacttgttagttatctcctgtaaaagtttctatttgttggcaaactaataaaggctgctcaaattagtttgatgtaggtttaggagtggagaaagggaggagaaaaaaaatactataagcactattagagagaaaaaataataatttattttatgattatgaaactagatcccaattatagtctatatgtggttacttgtatactataagcgctagatgtatttctgataatataattattatttggataaaaaaatcccctgtaattttgacaattccaagaaataatttttatttgaaattgaagggaaagaaaataaatgattttctcccttgttttttttttccttgtccttaattaaaaatcacttaaaaatgaatgagtaatgataagagtacttttcctggtttttttctcccattccttttcctcatccaaaataatacataatatatacaatacatttgaattactagaagggaaaagttaaataaaaggtgcgagtttatcttttttgtactttgttgttgattgctttaatcaaagctcttctgcttagctatttgctatcttaaacattgaatcatcttagagttcttttgacatattcccccctcacccttcaaaaaaataaaagcttattgtcgatgccacttcatttataagtaagcatctattcctgtcattttttattggtttagtctattttcaaagttttagaagcggtgacattaaaagaaaaaaaaaattagaaatggtgttcatcgtaaatatcctagaaacaattgtcttatcattttatacttttggtatcttgttagttaaatatttgtttgaatactttatttaaaaatcacaaattatttttataactttaaccaaatacctttaacttttaatttaaatacataatatgataaaaaaaagtacaatgcaatttcccttttatttaaacatattttacactgtcattattaaaaaaaatacttaacaacaattctcaattaaaagttagttcaatagttctgtttgtacatcatacatttttaaaaaatactcaacgtgggaaagtcatttagtatgttaatgtatttttttttttgtttcatattatttgtctattagataatatacatttcttaataaaattattaattgcacaaggtattataataaaacgatattcattaataaaagtgagaatcttatgaaaataattaaagtataattataaattcatttcattatttagagaagataccagaaaatgaaagtattattagaaaaaaattgatattttcttaaatgaaaaatattttaaggagtaatactatatccttttatagctgtaccaaaaaagaaatccttgtataaattttcctaccaattttcctattgtctcataaaggaaacagtagtaaataaaaaagtacaaacagtaatatttaatgtcctaaaaatacaaaacacattcaacatttactgtaaaaggaaagtaggagattgataggaagacgtagtaagagaatttaaaattattaatgttatctttaagaagacataatataaaatgaaatgagtaataaatgcattaatcgtcgaacatatgtcaactgaacaaaaaaaaaagaccagctaacatttactggcaccgaaattatttctatacataaatacagttgaaatatatttttgcatttccaattaggtaaaattaatatactcctacatgaacattcaatttcataattccaggtataattataagtataattaaattaatccatccatatgttttagtttgttttgaaatatttgtcatttttatcaagagagtctagtttaattggttaaataaaaaattattcttactctcataattttataatttttaacaaatttaataaatactcattttgctacaaaactattaaagttctagctttttcccccttctaaaactatattttagagagtattttagacagtgtgttaaaaacagcattttggggattgttttgcaggcactttatttcaatttttttaatattatattcatttattgatatttctttaaatgtttaaatgtattgataataactatattttaactctttcaacgaataaatgttttttgtaaaaaaacattttataactacaacttatgcatttaataatttttgtaagagaaatatatatatatatatatatatatatattataatatagtattattattggtcaatccttgacacgaagataatcacgaggtaattcttttacaacgttgctataacaaaaagccacgaatgcatttatttcagaataatgatacttaaaatgacgtgaaatgattacagagaagaaagggatagagtaagaaaaataaagtacacaatgtaatgagtgacaatatactatattattataatataaaaaagagaaaaataattaaaaaaaaagagtgtaataaaatatataaaaagaaagggataaaagataagagaaaaaccaaaaaaaatagttttatgatttaaaaaattaaaccaatgattgattcaattaaaataatgagttgataggttattggtcgtattaatgagttgataattatatttgaaacatacaaactggtataggtaacataaatatgagtatatatgttaattgggatataaatttaataattaattatgataatttagtggtaagttgattcaataataaattttatatccttgttcaatttttgagtgtgacatatttttattttgcattttcattaaattttgtattttctaaataataattaattttgattcaatcagtttagctaaatcgatttatgtgtttaatcaattcgagatatcaatttaaccataaaatcaatcgtgccaataggtcacactggattaattacatgattaatccgatgaataatttcattcgattagaatatgagttttaaaagtatgatcaaagccatttattttatttatttttgcattaaaatctggagtcaatgggtaagcttcttggtagacaagctttccattttcattttatttgaagtattccatactctatcttcaagaaaccgctcccaaaagacaaacggtgccttcctacatatccttgatgttgctcatcttccttagattttgtagccttttttacttttctattttctcttcctatatcaaccccaaagtagcaacactaattgttttttttgtttttttttgtggggggggggggcacaagcaagtgattcacacacacacacacaaaaaaaaataataactctaagccagtgccaaaaaaagagtgagattaatagtagtaatgtagtaccacattaatccaaaatcaaatcttttataatttggtcaaagatacattactatcattaagtggcttaagagtatactaattaaatagttaagtcgagtacatcattatccattaaattgtgtacttacccatcctctttcatttgtagttttccctcgtgcattggccaaagtccctttatttatttatggcttccgtttcccaaagtcctccccttctttttgttgcatatgttttacaaaccaccaaacgacatagtaacataaaagagacatcgttttttgttcataaagtttttttaagatagtcgaagaagactcgaagtagagaaataaacagttgttgtaatgttgttcactccagcagaatgattaagtgtgttgcaagccaaatgggacaaaccatgcttatctcgaaaccctaattagccaactctcttttcctacttaacagctctagcacaccgtggcattcccaagcgcatgttctcttaaactcaaataaccattcattttaccaaaacacccccacacccaattctcttccctatattctataatacaattttttattaattaaaattcattaaaaactgttcttttttacaggagtaaataaacgaatgcattttttcctaattataaaaaatatgaattcgtctttagaataattattaattttctcccatattcttgatttatggtgaaatttattaataaaacatttattcattcttcatgtaaaaataaatgcatatattgatttattaacaatatacgagtaatatcattaaacataccactattacatatttaactccgagtatttatggaatacaatttaaatttgtgatattattaatttacttaattatttttgttgatataaatgtattagtaatttatttttatataaaggactatataatataaggttataagtgaaatttatgaaataaatgttaagacttagtataaaattttatagtttttaatgaattttactcaataacaataaatatttaaaaaagttacatataattttgaggagtattaaaattttcaaacatgtttattttaacacactttctattattaattaatatatattaaaattaaatattttaatgggctctaatacttatttaatgcatttttataatttttaataattttaactaataatataaagtatgttaaaagaattatattaaaaagagtattgatgcctttcttaatatttttaagtattatatgtactattgtccaatcaaaattaaaattttaccttaacaatttgtgaattttttttaatacatatctttactacacatgttatcaatgtaaaacctcaattttaattaaaaaacctaaaccatcattaaataaagtgtttcttactaatattcttctttccgttatagtttgtcactctaccaaccgtgggcaataccgtcacgccgagaaaaatacacgagaacccacgtttcgaaccaaaaagccatcagctgaatcccgatattacccttcgcaacgaggcgcgacaataacaaaggcaagggtacttacgtacattccatcacgctccagacattaaaactattaaaataaaaacaaggaacatgagcgatccgcgcaaaaagcaaaaaagaagagagagaaacagaaccgtttgagaattttagagacgttatcggacttcaaatccacaattcgccggaatttgggaaccgcggttgcgtccggagcctcgttagtagttagttagggtttcttttttctctttcttctcttccattcggtttcgaattctcgcgattagcgatgggggaacgaagctgaggccgaatttcaaggttctggttttcgtcgtcgctgtggagtgaacaattctgtgctgctggtggtggtgatgtttacgccgcagagggtttggtcgggctggtccctgactccgaataagagcggggttcggggcggaaccgggtcgggttcggatttgggtccgaattcgggagatagagcgagcacgaagggaaaaggtgtcgcggttggtgagaatggtgggaacttggatcgtgaagttttggttgagagggtttccagcctcgagaaagaggttagtttgttaattattttagtttttttggttttaatgttggggcgattcgttgtcgtttgcctgttatactgtgacgtaggcgtgtattcaagttttagatatggatttttttttttttttgtggtgtttcaagttttgatagcttttggttttgatttgaatttcttgggtgtgtagtgctacggtggaaattgagcgattgctacggaagtgttttttctaaaaggattttgaattatgggatatattctgtgttggtcatttgttaaatttaaaaatatcttttttttttttttttttttttttggtttttgtatatttggtttgggtactgaaaattgaagcttgattctgggtggtagcttgttatgttttgtttcacaggatgaggtttgaagatagtaattactggggatttagtttccgctttttaattccgtcctctccctttctagtcttgtgatgattcacattagaagttggcggtaaagctaaatgtggtattttgtctttggatctggctattttttagattgagaggactgctagaattttcaacaattaaatttcaaatttacatttaatttggactaaaattgaactggctcatttggattctctcaagtgcttgacctcaccctagactcttgaagggcctatttactatgaattcagtgagattggggatttcgttgtattttttttttttggttcttggctttgtctatcatcatttttatatccttgtttatctctttttttactaacattttttattgttccgtcaaggaaggaagggaatatttggcattatagtaaataattttattattgatattgagtatctggagtagttaaacaagacctaatggagtgagatatagattggcggacggtatgtcttaggacggagtggaaaaaagctataagcttggtggagggttaaacccattagtagttctatgttccagtcgttcccttgttttagttttttttcttcattttttccctcttcctttcacccctattttattttagcttatttttcctctcttttgtcttatttccactttttttcttcccttctccctttctctttctttgtcttatttccgatctatcattgagtattaacttgggttaaaagtgatgttgatgttgatgttgatgatattgagtgtctggagactttcatcattgagaagtaatgtgtttgtttgtgtggatatggctgtaaaagtaattagaaaagagatgcatttcaatcttcatgttctattttactgaagtttataattgagcagcaatgttgtatgcattgtttaagttcacctatcattaaaactagggtcagacttctaggttaggtataaacactaagtttttgcttatatgttgtttgagtcagtgcactttcatttcaaaagaaattatctcacaattttggtagctccaggtgttattctttcattttcagtcacccagggttctccatttctctaaatgttgtactgtgataaatactgattggctttaggatgactatgggatgttaagagggatcttaaaatgaaaataaaatatatagaaggggagcttagtgaatatggataatcatatgctacttatctttcttgtcattaatatttgtgctttttaccaatgaaacacagcaggacactagataagcatgtcttcttgtccaactttaacagttttatacttttattatttttccaattatattttgtggtaaggttgtgtcttggtaaagcatgtcttcttgtccaacttacctggcacagcggtaaagttgtgtcttggtgacctgttggtcatgggttcgaatccggaaacagcctctttgcatatgcaagggtaaggttgcgtacaatatccctcccccttacctgcgcatagcgtggagcctccgggcactggggttacagtggtttatattttgtggtttagtttgacctgattataagtttttctgggccagctttatgagtaccaattcaatatgggactgctcttgattgaaaaaaaagagtggaattctaaatatactgaactaagtcaagatttagtagaagtgaaggatgctctagaacgagaaaaagctgctcatttaattgctctatctgaggcagagaagcgagaagagaatctgaggaaggccttgggtgttgagaaagagtgtgtgcttgatgtaagttttttgacatacttgtttacatatgaatcaacttcttccttaaataaaaaatgcacgactgttttatgaattcttatttatgatggatagtctatttccatatacttctattgtcttaacattgaaatatggctatttcttactgatacttggaaatttatgcatcaacagcttgagaaggctctgcgagaaatgcggtcagagcatgcaaaaattaaatttacatcggactcaaagttggctgaagcaaatgctttagtagctagcattgaagagaagtctttagaagtagaagccaaattacgttcggctgatgccaaatttgcagaaatcagcagaaagagttcagagtttgataggaaatcacaagacctggagtctcaagaatctgcacttcgaagggatcgattatccttcattgcagagtacttctttgtctttttagtttaaatatcttctgttatctttttaatttaaatatttcttgtggctaattaattctgatttgtgacaggcaagaagcacatgagagtacattgtctaagcagagagaggacttgtgggaatgggagaagaaactacaggagggtgaagaaaggctggccaagggtcaaagaattatcaacgaaagagagcaaagggctaatgagaatgacagacaatgcagacagaaagagaaggaccttgaagaggctcagaagaagattgatgcaactaatataacactgaaaaataaagaagatgatgtgaacaataggattgcgaatattactctaaaagagaaggtaaatttttgtttgtgtttgcaatattgcttatttttatttttgtttatctggtgttatgtatttaattggtccatatcctcttatacaggactatgattctctgagaataaacttggatatcaaagagaaggagttatctgcatgggaggaaaagctcaatgctagagaaaaagtatgttcttatacctatttatttccttattatatattcttggaaattttgaagatggtggtcaatggtcctatgtaagttgctgaattttattgatttattttttcctttactgttttgcaacttgatcctgtgtaagttgctgaaattttattcaatggtcaatggtcctatgtaagttgctggaattttgttgaattcttggagtattggtattaaattgtcaagactgattataaaatgagtgtgttgtgagcatttttgttattgaatggtatgtgcccatactcttctccattttctttcttctgctgaatacagattggactctttgcaggttgagatgcagaaacttctcgatgaacataacactattcttgatgtgaagaagcaggagtttgaggtggaattggatgagaaaagaaaatccttggaagatggattgaagaataaattggtggaagtggaaaagaaagaagctgaaatcactcacatggaggagaaagttgcgaaacgggaacaagccttgggaaagaaagcagagaagcttaaagagaaagagatagagtatgaacaaaaagtcaaagctttgaaggaaaaggagaagttaattaaatctgagggaaaaagtttggagactgagaaaaggaaaatagaaagtgagagagaggaattgctcacacataaggctgaagttgagaaaataagagctaacaatgaagaagagttgttgaggataaatgaagagattgatcgacttaaagtgactgaggaggagaggtcggaatatctgcgcttgcagtcacaattgaagcatgaagttgatcagtacagacaccagaaagagctacttctgaaggaagctgaagacttaaggcaacagaaagagacttttgaaagagaatgggatgagctagatctgaagagaacagatgttgagaaagagctgaaaagtgtgattcaacagaaagaagaactattaaaactacaacaacatgaagaagaaaagttaaagaatgagaagcaggacacacaggcgtacgtgcaaagggagttagaaactcttaagttggctaaagagtcatttgctgcagaaatggagttggagaagtcaagtctagctgaaaaagctctaagtgagagaaaccaaatgcttctggattttgagctgcagaaaaaggaacttgaagctgatatgcataatcagttagagcagaaggaaaaagatttgatagagagaaagaagttatttgaggaaaaaagagagagtgaattaaacaatattaacttcttgagagaagtagctaatagagaaatggatgaaatgaagcttcaaagaagtaagttagagaaggagaaacaagaagctgatgagaataaaaaacatcttgaaaggcaaaggatggaaatgcaagaggacatagatgtacttgttgacctcaacaggaagctaaagaatcagcgggaagaatttattgtagaaaggcgacactttattgagtttgttgagaaaattcggagttgccaaaactgtggggaaatgatctctgaatttgtgctttctgatttacaatcctctgttgacattgagaacttagaagtgccttctcttccaaaattagcagctgatattgtacagggagttcctaatgacaatttagcttcatcaaggcaaaatactggagtgtctcctgcaactgatccaaagtcacctgtttctggtggcactgtctcttggctacgtaaatgcacctctaagatttttaaaatctccccaattaggaagattgaatctgaagattctggtactttaagagatgttgtgactttgtctgttgagaaaactaatgtggaagattcaccaggaagaattcctgatactgaaaatgaagcagagttgtcatttgctgttgtaaatgattcttttgatgctcagagggtacaatctggcaatgatatcatcgaggttgaacctgaccatgaaacttcagttgaaaaccagaacaatgttcacagtaaggcaccagaagatttgcaggctcctgattcaaaggttgggcagcagaaatcccgcaagggagggggaagacccagagtaaagcgtacgcacactgtgaaagctgttattaaagaggctaggggtatacttggggaatctgctgaagcattacctggggaatctgtggatgatcatgagaatgagtttccaaatggaaatgctgaggattctgccaatgagaattctgaaagtcagaaaccatccaatagaagaataccagcaaatgtcaggaagcgtaaccgggttcagacatcatctcaaatgactgtaagtgggcatggtggcgatgccagtgaaggacattctgatggtctaattccagggcagcgcaagagaaggcgacagaaggctgctttactccccgcacaaactgctggtgaatcaagatataatttgagacgacccaaaatgttagcactctgatttagaaccataatttccattttattattgaatatgatagctgctattttttttttttttttgtttttttgctatttgcgcacttactcatggatgtgcactgaatttttatagtggagcaacaacttcatctgttagagctatgtctggtggtggcaaagaaagtcagggagaggttgatcgtgtaaaagatacagaagaggggattgttgactcaaaaacttctcattcacattcggtgggcattactaatgagaatggtggaagcatacatcttgagcaggtaagcttggtgtagcgtttaaataatgcagatattttaagttctataccttgccccttataaacccctcggtgtatgtgtatcttatgaatcactgagttattgaaaattgggattttgatagtaggatccagaggttgacaagttttgaatttcagttaaattgcttgtcattatttgtttcagtctctgaaaggtgcggagaaaagggacggttatggtggtgataccatggggacctttgtcaacaatatggccttgagtgaggaggtgaacggaacaacagatgatgcggaggagaatgatgctgagtataggagtgaatcccatggggaagatgctactggtggagttgacaatgaggacgacgaagattacctgcaacccggtgaagcttcaatagggaagaagctttggaatttttttacaacataacaccacaagcttcttgaaaatgaagctgtgtcttgacctcatcaactttagggatgatgtccgaagttatcttgtattaacaattggaagtagatctctaaattataaccacgagtggtagtacttaggagaggtgattgaatttctctagtttttttttttttttttttttttttttttttttttttttgatgtttggattgaacctcttggtatttattgatagttttaggcatttgatagtgtagctaaagtttagaggttggattttagctacctccccttggaaattgattgaatccacatgtttgtatctccagttaaatgtgattgtttgaatttaatgagggtgcatgtttgtagcactaaagaagagacctcaacttagacagcgcaatgatgttaatctataattatatgataaatcaagtagtgttaggagagcctttatgtgttcgaaaaaacatttggggaatatgacggatgaaattacgagataagatgaaggtggacaaacgtggacaattaggtgatgtgccctctgcgatttcttctaacttgttactcgtcaaagaaacacccttcaaatcagctgtccattccctcatgtgagatacttctgtcaaatttttattacattttatcatgtaagtgtgattctcgttcaagatatgacacgccatcttcctcaccagaccattcatttgtaaattccattgacccaacaacaaagaatggtttatgagtttatccactatgacacgtccccatcaaatatttcctacaaactcttctttccatttaactatccaccctttacaaccttcataacccatatatctgtcaaaatgagtaggaaacagtgtacaatgcaagaaacatttttgcatgtctttttcaattaaattgtcatagttacagtttagtacgaacctcttttccgatttccaatttgtcaagtttattcaatgcatgtctccaccaatggatgtcattttcccttttcatagttcgagccatcacattgattccaagtggtaaactattacatttcattacaacagatcttgcatattctagtacttcacaagaaagtcgtgcagctgtttcacagtgtccaagttttagcaaagataactcccaagcttcttcttcttctttaaaggggaatattgttatggaattatgtggtgggcaatccatctgttgacacacatgtttcaaacgagttgtgataatcaatttaatgtcattcactttaagaggaatccccaccttttacagatcaatatattcccaaacatcataaaaaataagtagtgtttttactcttttctccaactctgatttcaaaattgtggttctagtcatctcatcaccataaaacttaacctgtattgtttctgcaatgtgatgcaatttggaaatggtgaaatcatgggaagcagtgatccaaaagacatccttgaaagtcccctttcttttaatctcattcttgatataaattgttaggaatgttttttcaactctcccattccaagtatgccaataatgaaaacttcctcatcctccagaagatccaacatgtcgttcacattttcatccgaccaatcccaaggccgcttttccagcaaacattgcaactcaccatccaattcatcgggctcgaacaattcattagccgagccagattggtgcaatgagtcattcacattaatagctttttttttttaggtcctttagtttatccaacaatagtcaaagtaattatcacggtcgtggaactccaaccattgtatttgtctatcagtgtagttttcttcccttgttagataggataacaactcatttatagtcaaagcatcgttaccatcgctacctccgttcaacgtgatcttctatcacacttatttcattgttttaattatgctacattttttaattttgtgttgctccttgactatagaataacgcaactctagtgtgtttaaataatgagtctttagacaagaaattctatttttgaattattttatccaaataaagaatatatttaaaaagtgaaaggaattaatttaactgaaataattaacttttcaatgaaggttgaatctaagtaaaaaaaaatatgtaacgaatcatatatgaaaaatatatattggaatgtaataaatttacctttttatgtcacgctaacgtaagtaataaaaattgaactcagtttaatatttagaggaatgttaagcactaacagctttctcgtgtaaaataataaaactgattattgagaatttgtaagaagcgttacaatttatccccttttgttaatttatttaaaatgtactctaaaatggtgacacaatttaagaacatattgaaatggcaactagaatgcgtacctcttaataaaactgacaattgtgtattgttttgagggttaactgaaccaccaacaatcattttgttgtctccttcaaccgcttcaatgcaacaagagatatagataaaacaaaatatggtcaccattttcaaacttcaaaagaaaatcgataaaaaagatgtcaaatagtaacatactaatactattaatactaacttaacatcttaaagatgataaggtacttataataatgctaacaattaaggaaagtttcatatgacaaatctttctctctcgcacacaaactataaaactgaggattttaaaataaaaatcaaactttttgtcacctaagaaataaaaaacacgagtgtacagcaggaaatgaacaaaacgaattggtaagtaaccagattcataccttctaatagattccgtatatgagatcgtttcagagaagcatctggtggagggaaccaacaactgaacttggttatcatggaaaggttaaagttgattggagcttgttccagaaaacgttccacatagtggagcaaaaagatgccacaatcgtatgcattttgttgctgaggcagctcaagtgacacgaatggaagacgtaaaaatttagaagaaacatcatccctcacattgttgtgcctctctttccatgcttcacatagataactttggaaaacattgtggagatcttcatgaattccttttcgggaatccatgtgcaagatgcaatgttctttgggagattccttagtttcttcatctctgtagcatgtcatcacttcagcaggatgacaaatgacaatcaaactccagtgaagactatggtttatgggaatgaagatataatccttttcaaaaaggttcacttttgttgtccaattgcttacacgctgaaatgctgctttaccatcaaaagcaattgatggattatatttgcctaaatcaacaagcttaggaaagaaaaagcaattgaaaaagtgaaacctgtcctgtttatcagttggaattttatttttcaaatacttgatataaaagtcagtgatattatcattaatgcatttctcaggatgtaaaagctcaatatctctctttctaatacaaacagcatcagggtccccctttggataaaaaaacgccctttctatgtccttgctttcaaatgcagcagaatcatgctccactatctgatctcccaacttaaattcatcttctgagggattgaagttgaagtagaaatcaaagaaaatgttagacttgatttttttttttttttgatgagggaagaaagaaataaaacataatgaactactgcctaacataagtaacacctcaagaatcttgaatgtagcctttaatttagacatcttgttataaaataacttttaaataagttactattaatgatattttttttaagaaaaaatatgaatcatatttttaaaaaaaatatgaatgttatattaaattttaaaataaatttacattgtataaatatgatagacttgactattattacaaatttccacctttatctcatactttgaataacaataattttatttttataaattatatataggtattacatcattattattgagaaaaataataatttatagtaaaggaatttgttaatatatacatgtttattttttgtattaatgcgctaacaagttataattaaatatacaaatacgagagtggtttgaaattagagaagtatgtaaggtggtatataaaatgcacaatcaaattagagaagataaaaaagtattgtaaatatctaattgagagggtgagaaaagtaaaaatcttattctccaactgtgttctaatttacaatactcaaatatctttcatcgttgatgtaagtgtaatgttaaaacctaagtgaaaatatattagcataagaaaagattgcagagaatattaaaaaaaaacgtcaaaatcatcaaagtcttaacaggctagtttttttttttttcaattattttttttaataactgatatccaccatacacattatgaatgtttttgttcatattattggggtttgtatatcttcaaggcagagagattaaaaacagaggataggagagagaaaaaaaggataattaatcctaaaagtcaaattaacggtgatttataatttatggtgcataaccataataataataataataatatattactacttgattctgagaatgaagcagagttgtcatttgctgttgtaaatgattcttttgatgctcagagggtaaaatctggcaatgatatcatcgaggttgaagctgactgtgaacctttagttgaaaaccagaacaatgttgacagtaaggtaccggaagatttgcaggctcctgattttaggttgggcagcagaaatcccgcaagggagggggaagacccagagtaaagcgtacgcacactgtgaaagctgttatcaaagaggctagcggtatacttggggaatctgctgaagcattacctggggaatctgtggatgatcatgagaatgagtttccaaatggaaatgccgaggattctgccaatgtgaattctgaaagtcagaaaccatccaatagaagaataccagcaaatgtcacgaagagtagccgggttcaacatcatcccaaatgatcgtaagtgggcatggtggcgatgccagtgaaggacattctgatagtctaattccagggcagcgcaagagaaggcgacagaaggctgctgctccccccgcacaaactgctggtgaaccaagatataatttgagacgacccaaaacgttaggactctgatttagaaccataatttccattttattattgaatatgatagctgctaaatgttttttttttttttttgctatttggacacttactcatggatgtgcactgaatttttatagtggagcaacaacttcatctgttagagctatgtctggtggtggcaaagaaagtcagggagaggtcgatcatgtaagagatacatgggattgttgactcaaaaacttctcattcacattcggtgggcattactaatgagaattatggaagcatacatcttgagcagataagcttggtgtatataataatcatgaaaaaataaataaataaataaatttactatattccgtcacaaaaagcgttagcgacggaattagcgacggccagagagtggtgccgttagcatgggaggtgcgccagagtggtgcgattagcgccagaagtgtcgccagtagtcccagaatgcacctggaggctctttttctcgaatatctggcacaattagcgccagagtgatgcgattagcgctaggaacatgtccagactcgaatatttggcgcaaatattagcgtgggaacacgggctgggggcctataaaaggccatttttacgaaatttcaggccaaaagcttcattctctccttcctcaagtcttttccgccattaatgaagtaggaagcttcatatctactccattcttcatctaaacactttccacccaactagaaagttgtttagaacttctccatgagctagattccagcttcagttcctcgagagaaccattaatcggagagatcccgttctctagggagctttgcaaaacttagttttggaagggaaagaaggcgattcaaggacgctaaagcttggagaagtgatcctctagccttccttgacagtttagaggtaagaaactcaagttttaccgattgatttgtgaaattgttcttaggatgaatagtgacccatttgtgttagggctggaattaggcttggattctttagaaaaatatgctcaggaggttgttctgatgaatattgaactttgaatcttgactattgatgaagtttggttttgactctgaaatatgtctaagtaggaagaatgatgatgaaatgaaaggtattatgataggtatgagccttgggacgtttactaaaagtgttcaggagaccgtatagaaggtgattaagtgttggattaattgttttgaataacttggttattcttgaaatatagagtggttaaagcaattgtgtgctttgaactagcttatgcagagtcttagagagactttagtgccttggttaggctgatatagatcctactgaggatctgtgagttgcctataaggtggttagttctgataactttaagatagagaacaaaaaggtttaaatggaaaggaataacgtttcttttcattctaacggttgagaaccattattgattgtttgtatgcctttatgtagggtgtgattcagaggctattagtgggtgtgaccacgaggccgggagaaccagtgtagcgctcagagcaggtaagctctttgttcttgggagtgtttcccgtggtctgtgttccatcatactccgaggtggtgatggttattatatatatcatgaggaatgtgtattgaaattgtgtgttactgttttattgaaacatgtatatgatgtatatggattgatgatatacactgtgatagtgtggtgtgattgttgagattctctggccagtagaatagattatatgtgatgtaagtcctgagggaatgtgcgcttcagtggatgattttcctcagacattgatataaagtcctgagggaatgtaccctttagtggatgatcttcctcaagcagtgttgaaagtcctgaggaaatgtgtccttcagtggatgaccttcctcaggcattattacatacatgtgatgtgctgtgatttatgagagccgtgatggctagatgatgtaatgccaattttaatattatatgccatggaagtaaaccagggggtaggaaagacctccaaggaccctgagtttactgagattgttatctcacccctgtaggggattatgttttgcaggtgatactcagggagcggctgatagatcctagggcaagaggcccgaatagagggatatggttctgtgggaaccttaggcacagagtttgagagcatttgactctatcttttgatttatgcctattattttgtacctttagagggatatgtatagttttgatatatctacattgtatattatgagaattcaccatatatgatgtacagtgggtgttgttaatgacgtttgatgacgtcattttgtttattgcttctaattgattatctgtgataattgctgcgcttaacaaccatgagtcaatgttaatgaaccggatgcatacggcacgttacagtgtagcttttaaataatgcacatagtttaagttctatgccttgccccttataaatgcatatgactgagtttttttttcttctgtatatgactgaggtcttataactgaaattttcttttttcataattgagtgcaacagttgaggacactccaagtctccaatattcgtcgctggctttgcaaacctctcatcggagattataggattttttgttcatgtttgttctaataagaacttctttgtgttggaaaacattggtcgcattgattggaattggaactcaccccaaaaacaataaatgcattgttatttatggctgggctacggtgcatgaaggtcatgggaagatgcactaagtagaaagggtcatagatagcactgttagcagatgaatgagacaaaagtactaatttatggaaagaaaagctgacaaattagagcagaaccaaggattacaaaagggtgcactaaactaaatttatacatgtctttccaatcaactctaagtggatgctttattaggtgaaagtaccccttgctatgactcttcccaagtgtactaaactaaattatgtataaaaggttgtcttaaatttatacgtgtcatacttgtttgtgtttcaaaaagagaagataaagcttaatttgatattgtgtacgtagtaggcacagttgcccttgaattaggcactcagggttgaaacaattcaatatttaaggacttgtttggtacagtggtatctggaattagtagtatttgcaattctgtagtggcccaagactttgtaagacaggttgagtgttattgtgtcattgtcaaacgagatacactcctcaatgtgtgctgtggagtgagtatttgcactatatcgcgggggaagatggaatgcaggaaaattgattgaatgcctcaaagaatttcagaaaataagatttcttacaaaatgcaggatttgtctaatgtagtttgatgcagggtgtatttttttttcaaaggcaaacaaatgagtattataaatttataaactcactgtgttttgttgtcctctttacaatttgattttatctgtttttatttttgagattttatcataattactttgctaaatttaaaaactcatttcatcttccgtcttgaattcacctaggaccaacagtttgtactttgcatatctcaaatataaaactctactgtttgaacacctatgtaatatgcaattgacttgcaatctttaactatttttcatactataaaattataaattatttcaataattttttaaaaatatataaataaagaaaggcaaatttcaaaattgtaggggctaaatcttagtctaaaataaacaatgttattgctaaataataaaaactatgggggttaaatattgtttttcatttcaaagaattgtcgtctatttgtaagacaacaattttttatccgaaaatacattcttccctgaatgttatgattttgttgttgtctttacaagaattatgaatacaaagactaagtgacgtaaaataagaacatgatctgaatcaacataatcaatcacacaaattatgggttttttatactttagcttgggacaattgaatatgtcaaatatatcctcatatttacaggctaaatctcctttgcacactgtctctaattctttcaaatcgcaaagatgcaatttcgttaacttgggaagtgtaatatgttgtgggaactatctcatgcaaatatctccttcattgaatcacaacaatttacagatatagactccaggttctaaagttgtggactatctcctgcaaatatctccttcattgaatcacaaaaacttacaaatatagactccaggttttgaagttgtgccactaaccttggtgtcaacaacgtctctattttatggcattccactataagaaattccttgagatgagaaaacacccccgtgccagcaacatctttgcatatgacacttaaacttggcaagtcatcaagatccaaagatttgaggttttggatattaatgcataaggaaaaagatacacagaatagactctccaattttgagcactttcgaatgttaatgtcctttaaagatagagaacctttggatgacagagcagcacaaaagcattcccatttattattgtcacttacagatagtttcgaaaggtctcttggcattaaataggacaattctgtgcaatctccaaacttaacacttcgatgttcaacatacataagaccctcatttaaataaggcatcggttccctaaattttccaacatagataatataggttttaggtccataaacattgttctggatttcttccacataatggttgtagctatcctgatcgagaaagcttccagcaaaacatttaagcctattcatcccttttacatcttctatttttatacttgaacaaactcggagatctagatattgcatattggtcaaaccaggcagtacgcatcctgtatcaatttcaccgttgaatttttattctggaacagatcaagccattgcaacttttttagattttgcatactttctggtacttggaggatcgaattacagtttgaaatgtccaatcttgacaatttttttagctctccaaggggatgtatatctttcaaatttgaacatccacagagcactaaagaagtaagagaacccaacatagacaacgactttggtaaagatgttaatctatcgttatatgataaatcaagtagttttagagaattcatatatgtgaaaaaacactctggaatatgacggatgaaattacaagataagatgaaggtggacaagtgtggacaatcaggtgatatgccctctttgatttcttctatcttgttacctgccaaagaaactcccaccaaattagctgtccattcacttttgtgaggtatctttgtcaaactttcattacattttatcatgtaagtgtgattctcattcaagatatggcatgccatcttcctcaccagaccattcattcttaaattcttgtgacccaacaacaacaaagaatggtttatgagtgtatccactatgacacgtccctcatcaaatattttctgcaaattcctctttccatttaacaacccacttttaacaagcatcataacccatagctctttcctaatatcattaggaaacagtgcacactgtaagaaatatttttgcatgtccttaattaaattgtcatagctactttttagtacgcttaagatctctttttcgaattccaatttgtcaagtttcgatgcatgtctccacgcatatatttcattttcccctttcatgattggagccatcacactgattccaagtggtaaaccatcatatttcatcacagtagatctagcatactcttgtactttccaagaaacttttgcaggtgcatgtttttgcaaaaataactcccaagtttcgtctttttcttctacatgagagagagggtgcattgttattgtcttatcaagtaggcaatccatctattgacatacatgtttcaaacgagttgtgataatcactttaatgccattcacttcaagaggaatccctaccttttgcagatcaatatattcccaaacatcatccaaaatcagtaatactttttttcttttccccaactccgatgtcaaaattgctgctctagtcatcttatctcagtaaagcttaatctatattgtttctgcaatatcatgttgcaatttgagaatggtgaaatcatgggaaacagtgacccataggacatccttgaaagtcctctttcttttaatctcatccttgatatgcttggctaggaatgtttttccaactccctcattccatctatgccaataatgaagactttgtcatcctcgagaagatcccacatctttgtaacattttcacctgactgcccccaaggcttatctttcaaggataaactttgcaactcagcatgcaatgtaacagactgggacaattcattagtcgaaccagactgatgtagtgagtttttcacatcaatagctcttttttcaactcctttagtttatccaaccgatcgtaatcttgtctcttgaattttttgcccttgaacttcagccactgtaattgtcttcttcccttattatttgtgtttaaataatgagtctttacacagtaaattctatttttgaaatgtattactttaaaataatttatttagaaatatattaattaaaagaatttgaaacacactcacaacaagaagagagatatagataaaaaaaatacaatcaccatttatcaacttgaacaaaataaaaaaaatgtaaaatattgaacatttaaatagaataaaaattgaaatttatcattaaaggttaagaaagcattatataaaagttaaggtgacaactttcattgctatataaaaaatgtcaagcatattagttaccttataattgattcaatgtatttactgcctgtggactgcttgaactattgcgagctcctttattgctacgatatttggggcatttactaatacccgttccattgccatagagatgcacatcaattctattagcatttcgggcgaaaatcttttcacagtggttgcacataatctgatcgtttcctatttctgtaacttctttccacgtttcacttctgggccgaccacccgtttttcttttactactagacgctccatccattatttatttccaaaacacagtaattttaatatgggcctatctgtaaatatatatatatatatatatatatatatatataataagtgaaagaaaatctcaggattaacatttggtagtgtgaatcatgaaccaaatttcatttacaaaaccaaaaaggagaaaaacggggattaccgaatgatgcctttcctcgtagttgtgaaaacagaaacttttttgaataaatttgacgagtgatttgagaactgaaaagaaccagaaagagatttggtctcgaagctcaccgataagaactccgtctcttaagtcttaaccttacctttggggaatgggttgtggctgttatacaggctgttgccgtactgtacaagtgatttacaaattacaaagactttgactttgcaagacaaagacaatttcttccaaatttcatattccatttaatttcgttatatttcttgtagatattatagttgttttaatttgacccatctgattatggtaataaattcattaaattgtggggtataaagtgtgttgtgggattttttctttattttattcgaaagcaaaatatgtaattttgttacatagttgtagatattaagttatttaattagctagacttatggaaaatacgtttatgatatatatcattcaggatgaaagatggaatagaagaaggtaacatagtcaaagacttagttacaagtataaaatggtgaagccctaataaaaaaaataaaagaatggccttcaattgaagtcaacaaatgaaaagaaagaaaatgcaatgtgaagaaaaaggaaagaaagaaaagcaaatgttaaaaagaagtaatggaataaaaattcaaacttagatctgaatgcatatgaaaatagcggtatttcaatctcaatgttgtttagtcacttcccaagcactcctacctttaagccatgccaagttacaacctcatcaagaccttttgatcaattatgcacgtatttaggttcttatctttaggaacttgagaataggatcaaacttatggtagtactatggttgtggtggattgagagattattataatacccagacacttgagtgatgagtgaatatttgtcttggtgaggggtattcaagatagacttttgtgtttgatagatttgaaaagcattgtttaaattttgatagggattcagtcatgtttagcatactaagcttggagatcgttttgttcaatgtcatgcttggaaacttgacccttgcttcccactgaaaacttttgtttattgctgaggacaacaatatctaaatctgggaattatttgatatgctcctagcatatagtactttccaagctaatagaagcaaggaatcaatcataaatcatcgataattgtccataaatgctataaactgtgattattccttcgctaccatgttctcagctaatttgggcaattttatagcaggaatacaacaattcaagcctgtttgagcaaagttatttggcgctaccagtgccatttaccacgccattcgcgccagcaggagaaattggagcttcttgactgaggtcccacgctaccagcgtgaaaaccacgccgccaacgccatcaaagggaaacttgccaattgcttctgttttaccacgccatcagcgtgagagctcgatttctgtagcatctgaaagctgttaagggtagtttgggagttttacttccccaaatataaataccaaaagcccacagctttgagaggacttctggcacgaaatatcacttagaaaaggctagagaaaagcttggagagcttaactagggttgggagttgcaggctcaagtggagattcttctcttctccttcttcttcctttttgtactcagctgggcatgcttctttttgtacatcattgccaaccatgattaggtttggctagtttttatttgtagttaaggctaacacttgatgtaacttccttggattggattggatgctattattcttttatatcaaggtatttcactttaccttgcttgaatgagtatttatatcttgttggaattgatcactctagtaggatattgagagcatctagggttcacaataggaatattggagttctatgtttggacttgggaaaagtgacaaactttacattatctaggaatagaaatgtatgtttgcaaatcatttaatgtaacaacttaatgcttgacatcatgaaagctactaaggaattagagtttttaattgggttgaagggtttatgtcactaagggattaagtcttaactaccaactttatgaagatgcatgacttgagtaacttgtggtaaatgaatatagtaaacaatccatgtacgaaggtgggaagcattgagtgtggattgccctaactactatcgctcttatatcattgcaatactaagttacttgttcttaagcatttaatgttcatagttttagtctttaaattcaatcaattacacatacacaatacaaaacttcctttaaaacatttgccatccaacttatagatatcagttataatacaattggtgtatcaatccttgtgggaatgatatctcacttatcactttattacttgaaacgaatggtatacttgccgatttcgcaacatatactcagaataaggactgttcatacttgagtaatatcaatatccaaaagacgatgagaatcaaaaatgccttaaaacaaggcatattagatctaagatcaataaataacatccaaacaagatgcagctagagagggaaaaaattaagatgttttggtttcaattggatttacatttattcagataagcaatacagatagtctgaacacagtaaaatttaagggctaataataggattccattcataaacacttaattatgtgactcaagccacattatatatggacaaagaacctacccaaaggttcccattacacgtgtagttacatgtgtatttgaatcttaagtcttaagtattaagtcttaatcttacctttgggctttggagaatgggttgtcgctgttatacaggctgttgctgtgctctgacacgtgatttacaaattacaaagactttgactttgcaagacacagacaatttcttccaaatttcagattccatttaatttcgttatattgctgtagatattataagtagccaaatgctaacgaatgttaaaagggcatacatattttatttcttgtagtggggttccttttgctatcaggttatttcttgtagtgggatgtcttgtatatattattgttgttttaatttgacccatctgatcatggtaataaattcatcatattgtggggtacagaatgtgttgtgggactttttttctttattttattcgaaagcaaaatatgtaattttaatatgtgtctatctttaaacttgaaatcataggattatgtactattgtttttctatataggtgggtatattcatggaagtggaggaggactttgcttcaatgtgaacaagacaagttagtggagaaaggagcggggtaggtgagtgtggaatgaagatcatttaattcagtatactgttaaaaaaaatgagtgtgaatgagaagttctttgaaaagatgtggatgaaaatctcaggtattacaagtggtattgcaatcatgaaccaataattttcattagagaaaaaatgaaattaccgaagaatgctctctttgaatatctcaaagtttcttgttttagatttgctttccaaaactagtgatcagcactcgaacttgatccctctattcctggcctctgaacctaaacttggggaatagatggtcaattacataagatgttctagggttggttattagtattttttttaatgactaggacgtggaccaattttcgagaaattacgcatacacactcataaaacggcatattgttaaattttggaaacatgagtaattaaatatataataaaattatttgagagattaaaattgcttaccatatgtgaataaaaagtagatttttaagcttaattaaaaaataaaggtatgtttattatttaattataaaatatgtttagtatatcaaagttaagattaaattattgatgaaaataattatcggtcaaattttacttattttctaattgaattttgaattaatcaaaattcttttttttaatgttaaaacaaaaaaaatcattttttccataattctatcgattttgagaaattaaaaatttagatgatccaaagtaatttttccttttctctgccttttctatttggtcttttcgtctgtgtcctttttcatgcaactggtctgggcataaaaatatggaggacatacatatgtggcgcgacggagccatatatcatatatgtaatcttacaaattaaaagccatatatcaaggccaaccatgaataggtttgactagttcatatttgtagttagggccatacacttgatgtaaactccctttagattggattgggtgttattattcttttatataagttattttactttaccttgctttgaatggattacatctctttattagacttgatcattctgataatgtgttgagagctagggttcacaataggtatattgtgattttaaactctgacttgggtgaagtaacattctttacattatctaggaatatagatgtatgtttgcggatgatttaatgtgtcaacttaatgcttaacctcaggaaagctactaaggaattagggtttttaagtgggttaaaaggttaatgtcactaaggaattaggacttgactaaaactttgtatgaagacacattgactgagtaacttgagtaattgaatgtagtaaataatccgaattaagaaggtaggaatcatcgagtgcgtgtgccctggctactctctcttatattgtcgtaaacttaacttcattgtttataattatttgttgtttcttaattcttgtctttaatcttacttatttcaacatacaaaacataagtttaccaaacatttgtttatccaacttttagatacaagttataatataattgatgcatcaatcctcgagggaatgacatcttatttatcactttattacttggaacgatcggtatacttgccgaaaacgcaacagtgtccatttaaaaacaaatacgcatagctctgttataaactttaaagcaattttaaaaactaaaaaatgaatataaggcaggggtgctactgtcaatctagtaaactgttttgattgagcatgtaattgttcatggctagatctacatggacgagttcatttagaaaatatttttaaaaatgtcaatagaaattatgcttcatgtttcctggatgggggttatccaatggactcttacatgcttgcttgaatgctcaccttgttttcatacctgtttcctttaatggttgtggttctgtttattaatggatgttggtcttaaatgaaagaatagaacccatggttatcaataaacataggaatggaatgctaggttatgatatagtgaaccttgtattgtgcattgttttcttcctagaacaattttgcctagcagaaatttactgattcttagaactgtttagaccaatgctcacatcctgtactaagtgcaattgttctggattttgtttaatggtgccataatacatgttgaggattgaaaaccactattatttacctgagttccacaaagcttaacattgggttttctgtgttttctattaaattgatgcatgctcgccctgaatgtatatgttgattcatgttgtttccttggattgtagtgtttctgtgcactacatagtcttggttctaaatgctagaatttgacctagagtttagaagtgaaataggacatagaatgcttgactattagtagcagaatttatgggttcttagggttgttaacccaatcatcatattatgttgcatagctaagcgttctgactttgcttgaatgtgccatggttctaagaacttaaagggtatgtaaaaaaaattactttttatgagtaactcttatggaggcagaaaagtgaagaatatcatgttatagttttgaagagtggtgctgctgatgcacgcatggcaacagtaaggaacaagcttagttatgccatatagctataaggctggtagcatcaaggaaatcaagatttttcgagaccctatattatagcttgctaaattctattttatgttgggaattatttaatattttacttaatggttaaaatctaggcatgaaataacttgagaaaccaataattgcttgtgcttactataataagactagctgctagatgatataggtcaccaagaaattaactttttgatagtggaagtgactctgctaaataacacaacaatattgaatatagaaaatagcaatcttcgttatgcgctatgctgcaacctccaaatcatatagtcgttgttaccaaccttaaacctgacaattctaaactaccaacttcttgctcatgatgctacagccaaactgtataagaccaagtatcaggagagttcttgagctgctttaattttaaatcaccaaatgctttttaaacccacaatgaatctgtgtcctgaaatttaatggtacttgaagagaggtatattgtttcaactccaaaaggttttggcttcttgttgtgtatcttctcggtttttggttattctatagtggtgttattggggtttgagtttggggaataatttattgttctttttattttttgttttttaaagtattgggatcctgatttcgggagggtttccaacatgccaacaagagttgtcattggctgtttttgttgagttgttgagaggttcctcgtacttggtccttgtttgtggtggtgccatttttatatattgttgagttttgctccatcagcgagtgaaacttggttggtcacttgattttggggttgtggtatttattcgatttacttattatgtttactatatagtaagtttaatcaatcattcttgtcttgacacttgtaaatggattaactgtgtataattaaggattatatgttgagttttgcctatatatagatattagggtggagttataagattgatagatggtaaaaggagaagagatggaaaaagttgttgatggttcgattttagctttaacaagaaactaataattcaaaattaatatttaccaatgcttatggttgaccatgcagcttgcagcggttgcggcactgtgcgtgcagtatgaagctgagtttaggccaaatatgagcattgttgttaaagcactccaaccacttctgaagtctcccgctcctgctgctccagaaagttgaagcaaataaaattgcttaggtgtctgcatcttctgcacagctcgattcagttatctccaaattccatcaaatactacagatatatctatacatccgaagcagggtcttggaatactcgaatgtgaagaacagaacaaggggctgcttccaagagttgtagaaggactttttgatttcataaattctttggatgaagaaaagacatattcaattaaattgtcaatggtacaaaataaataattaaaaccacacatgactggcaaaatcatcaggttatagtaaattatttttctgattttgttaataatttgtccaggttgaaatctacatggaaaaagtaaggtatgcatagaaaaaacaagtatgttttcccccatatatgtacttagagaatattctattggtttccgattgacaaatttcttaactttgttggagaagctaattttgatgtgaatttgaattttgaacaggactcagaataactctatcttcttatatagggacctatttgatttatcaaaagataatatacaaagtaaggagattaaatcacgaggaataattctacctggtgttacagaggtgagctgcatattatctcactgcattccgattattctttttcattttgaagttactttgttgttcacaattaggcatatggtcttatgtacaagtactgagatgtaaaatttcaattttgaaacttgaatcctacttatgtactgacaatggttgacattcaaaaacataggtgttggctttacctgtttagcatttttcttaggattcataaacttaatagtctggcctatgcttatgatgattgtaatctcttaaacttaacgtgattacaagaagttttgaggaaataaaattgtagctttactattaattataaattttggtctaatgataaaagtttatttaagaagtggtatcaaagaatcatgattttacttttacttttacttttgaagccctagcgggaagagggaagagggggtattgttgcctttatttgggttttgggctgaatgtcttcagttttcacccatgaccttagtgaaaaaagtaaccccttgctcgatgccgatttaaaaaacttcaaggaagtaggttgtatccttattttatgtacttgacattttgattgatgatgcttgtaagttgtaattggtatagccctttaagcttgacgttatcctggaaaacatcaataaaataaagttgtcctctttcctttagttataacttttggccaatccaacagtaagctcatgtacatacatataaatatgctttagcaaattatctaaggcctaacttctttaggtaacaacataagagcattggatgaggcactccttgagctgattcagcaagtagagtagaatggaatcatttagtatttttatatgcaactttaaaagttttcctttccttatatgctagaagatatttgttttactgaaaagaaaagaaaaaaaaacactaattggtgattcttattcaattaacgtcatatagtactaacaggacccctgtttttcccgctgaagcattgcaaagcctatctgtaagaaagaagcaagttgaatagcattgtttggttttatttaacaatgaattttggcttctaattctgatctcaaatatgtacaagggaatagctaatcaagcaattggtgagacccgtatcctgctttgactcttaatcttataatgatatcaaattcagtgtttttataaaatatttttataggttatggataatattaaatattttataatagctgtatattagccttagccatcaaaactttggacaggatgtagtaatagattagggtaaattccctgttttcttgagggaggaaaagtagtggtaggaaggtcacttgccccctacaaccttcctaaacaaaacatgtagaaatgaacgtggccagcagcagaagtcattgtatttatatattcacaattcagtaagaatttttttccagagataaaaggtcttgcatcttcctaaatctctgtggtattgcttatgaatcattgttaaacacataagactatgaacaggacgaggtccgggaaactaattgtagtggacttgacagggtcagaggaagtggagaaaacaggtgttgagggaagagttctagaagaagctaagaccataaacaatgaagtttgataaacctaggatctcatgtaaactatttaaatctctcactattaagctgactctagtagattaatctatgtgtatgtgtgttctaggcagggacagatctatttgagagactggggcagttgtgtacattatttttatttttattttacataatctgtttctagcattagtttatatgttgatgatagtatcttgttatgtggatttttaactattgttatatttcgtgcattcattgtcatctttatttatttattattattaaatcataaaatttatgaagctgttttggttttaatgaagtaaatgctcctaactttatgactatatgtatcattataaggggtgtgatataaaaaatctcaagggcaacattttttttgtgatttttatccatttaaaaaaaacaaaaaaaaatacatacaaagacgatttttaggcaaaatcgtctttgtatgtggacatataaagacggtccgtctttgtatgcggacatataaagacggtccgtctttgtatgtattttttttattttttttaaatagatacaaagacggttattaagcaaaccgtctttgtatgtccacatacaaagacgattttcctaaaaattgtctttgtatgtatttttttttgtttttcttaaatagatacaaagacggttattaagcaaaaccgtctttgtatgtccacatataaagacagttttgcctaatgtaacaccccgtaggcctccggtgcgttatcattaataatatcagttaagcgcttaaaaacataatataaaactcagcagaagcaaagaatcgcttttcttgattcattatgtatgaaataaaagcatatcacagagaacatacacacaagacagatatttcacacccctgctgatccagtttatcatacagtacatatgtagacagatcatcagaaatattataagtatactaaggaggaacatcatatatcatatcaacatcaattctgtacatacatatatacaacagtatcacaccacaccgtggtgatacaaaagaatatctgccctcaccgagggtatacagaactatacatatctttggtgtacacacaccatcccttatcaagggtacaaaacagaaacaaaaccaaatctgagccttcaagctccctctgctgctatcagccaagcaggaacgtctctactcgggcctcctgccctgagactgctctcttctgcctgaagagtcacctgaaatcataaatccccacccggggtgagatatatatctcagtaagctcagggtccttgggaaatcatccccaccctggcccaccattcacaatacacacatcaggcaaacatatcaaacatggcccactggcctggccctctggccctcatcataatatgagcatcatcatactccaaacacatgaacagatggcagagctcctcaatgcctggcggagctcctcaacgcctgacggagctcctcaacgtcaatatcaatgtgagaccaaaaactcacacccgtgtcatcaaacacatggcagagctcctcaatgcctggcggagctcctcaacgcctgtatttatctattggccaacagatctatcacaatcatagcatacattcatccagcacagatgcacacatatcattataagaaatgtaacaaccaatgcatgcatcatgaatcatgaccaacactcccccggagtgtggtgtgcaaccaaaatgggatatcattccccagggactcagaacttacctggcaaagcctcgctctgcagttctttccctgctctgtggctcccgccaccaacaatctcacaatcaaggcctaatcaaggcacatgtaatctcatatcaaaatcaagccaacaggcattccagcacagaacatattatatacagaattcccctatcctagggttcaatcaagctcaacccacaccaggctgttcacagaccatacaaggtccctcaaggctgaagatcaagcatctgagtcatcccagactcaatgcataacacatatctgagcataagctttcctcagccttataactcaatatatctctggaacggtctaacctcaacacaggcaccgttcaactagcctctcaggctcataccatcataatcaaggctctagcatatcagagaaccatcaacaagtgactctacacaagtcacacaggcaaccacagagccaagattcaaagtcatctaaattagaaactgaaagctaatccttcatctattcatcgctctaaataagtttctctacaggaccctgggctaattctagccccagctcatatgggtcactattcacagaaaatcccaaattcaaaatcaaccggagaaatttgagtttcttacctcagtggcgaccaggaaggctaggggacaactttccttagctctgttgtccgttctgcgccttgggtccttgccaaactcaagttcctgagcttttccttcagaaatgggttctcactcaattggggtttttcaagagaagagatgaaggattcaagctttctaagtgattctctcaagtttataggtcatagggaggtgtttaggccaagatatagggtcccaaaaagcttggaacagccattaatggaggttggaggtctagggaggaagaaaagttggttttttcctcccatttcgcgattgaccctatatatactcagcctgcccgaggtctggcgcgatccgcgtcaactccctcgaccatctggcgctatccgcgctgcacttggcgcggtccgcgtgaaaaaccagagaaaaatggttttccaaggcacttatggcgcgacccgcgccacccttggcgctacccgcgccaacctctcggccaattgacgctactcgcgccatagccacgctaccagcgtgaacctgccgaacgtctggcgctaaccgcgccacacccttcactgggtcttctgcttcaaaaaaccggcgctaaccacgcgggacctggcgccaaccgcgccatacatcagggttatcacacctaacaaccgtctttgtatgtatttttttttgttttttttaaatagatacaaagacggttattaagcaaaatcgtctttgtaagtccacatacaaagatggttttgcttaaaaaattgtctttgtaagttttgtttttgtttttttttttttttacttttttaaaaaggatacaaagacggtttttagacaaaaccgtctttgtatgtacacatggaaagatgattttgcctaaaaaccatctttgtatgttttgttttttatttttttttttattttttaaaaagaaacgaagacggttattaagaaaaaaatcgtcattgtatgttgacatacgatgacgatttttccctaataacggtcttcgtaggtgtttaattaaaaaaaatgaaaaaaaatttaaatacaaatgaagatggtttttatcgtatgtggacatacgatgacagtttttccttactaactgtcttcgtaggtgtttaattaaaaaaagcaaaaaaaaaaaattaaatacaaacaaagacggtttttaaggaaaaaccgtcttcgtatgttgacatacaatgacggttttcccttaataaccgtcttcgtttgtgtttaattaaaaaaaaatacaaacaaagtcggttttttagaaccgtcgtcgaaagtaccccattttcaacgacacgtgcaacaacgacggttcaacaacctacgtcgtatggtctaaataaccgttgtcgtaggcatcctgtgtagtagtgcgtgtgtcttgactactctctcttatattattataaacttaacttcattgtttataattatttgttgtttcttaattcttgtctttaatcttacttatttcaacatacaaaacacaagtttaccaaacatttgtttatgcaacttttagatacaagttataatataattgaagcatcaatcctcgagggaacgatatcttatttatcactttattacttggaacgatcggtatatttatcgaaaacgcaacaatgttcatttaaaaacaaagtcaaatacgcatagctctgttataaactttaaagcaattttaaaaaataaaaaatgaatataaggcaggggtgctactgtcaatctagtaaactgttttgattaagcatgtaattgttcatggctagatctacatggacgagttcatttagaaaatatttttaaaaatgtcaatagaaattatgcttcatgtttcctggatgggggttataaaataacgaatattggtacatgtggcatgtatcaagattttgtaaacgttgaagtttatatataaaattatgatcacacctcatcttctacacccctctctaaaaagggatgtcaaacactcattttccttttagaatttggtaggtccctgtgtcagtgtatatgttttatagcttgtgttgtaaatttgtgatgaattaattattgttgtctattcaaattatttaatcagagatatgtatcttaccgtggagatggtaatgaagagtattgttgggaacatagtcatatacaagccatctctgatgctcggatgtacagtaaacaaccatagaaaccggatgaagatgatgtacacggctaataatctcaacttcttacctgaattcgcgttcccctttcccaccaccaattttgagctgtttcacatctacttatcttccatctatgagaaaacctttataaacacagccaagtccaccttctcccaacaaattttgtgctgaaaacccatttgtagcttgttctgaacatcatgatgaatggaggtgcatatacgaacgccttttccttttattcgatccacatgtgctttaattcttgaaacacctcctttaaacttgagtccacactgcttgcacttcaatgtaccgtttccttctttggtaacttgattccagtagtgctcatccataggcctacccatgattattatatttcctgaactgaacacagataatgaaatttcaacaatattgatgcacatagtacactatgtgtgagtatgactctattaatcatgtagtatattttttcctgcagagagatattatacatatataaaaggaacaggagagaccatgtcttatgtgctccttttaataagatatgatatggttaacacttaacagttaacactacagaaagaaagtacacctatgcgtagcactgtagtttaataatcattaaaagtatttagcaaaaaataacaataatttgaataatttgcaaatggcgtaaacatgggtattgtataaatcttcactgcataacacagtgtcatgggatgaattaagcaagttcagaacttgaacttatattttaatcagacaatgtcgttaagagatcaacaattaaaaaaattaaatatacaaatacgagagtggtttgaaattagagaagtatgtaaggtggtgtataaaatgcacaatcaaattagacaagataaataaatactgtaaatatctaattgagagagtgagaaaagtgaaaatcttattctcaaactgtgtgttctaatttacaatactcaaatatctttcatcttcttggatagttgatgtgtgtaagtgtagtgttaaaagctcagtgaaaatatattagcataagaaaagattgcagaaaatattaaaaacgaaaaaaaagaagaaaaaacacagaaacaacgactacaatcaaatatgatatagatttagattttctattttattttaaaaaatgaaaaaaaaaaggtgacccggcaactaaaaaaagttgacatgtaaagttaattgaatgacgtcaaaatatcaaagtcttaacaggctagttttttttttttttaatagttttttaataactgatatccaccatacacattatgaatgattttgttcatattaatagaggtttatatatcttcaaggcagagagattaaaaacagaggataggagagaaaagaaaaacgataaataatcctaaaagacagataataataataataataataataataataataatatattactacgtgatatgatgtaaaatttactaattcttcgcggttcacctcaagcactgcaaaaaagcaccggacacacgccctgctttccctgcaaacaaacactttatctcattacaaactaagcacaagagacgaaaaactggcagaaaattagagagggaaaaataaaatttaagtgtcctaattaagtcctggcacggattaacactagagcccaaaaattgagaaaaacaagtcatactgaccttgaatctatgtgtcacagaacgctgctaccattcatagacccttggcaatccaatgcatgcatcagttccacctatcacggagtcatagttaaacaccctttgatgtgtcagaacagttgtggaatatcaacaccaaaggttttactttgaatgtgagtgaggtcatattttgccatataaaaggccaagtctaagaactttgaacaatcacatattgattgtaacaaataattaaagtcacctgtttctggtggcagtgtctcttggctacgtaaatgcacctctaagatttttaaaatttccccgattaggaagattggatctgaagattctggtactttaagagatgttgtgactttatctgtgtggaagattcaccaggaagaattcctgatgctgaaaatgaagcagagttgtcatttgcttttgtaaatgattcttttgatgctcagagggtacaatctggcaatgatatcatcgaggttgaagctgaccatgaaccttcagttgaaaaccagaacaatgttgacagtaaggcaccagaagatttgcaggctcctgattcaaaggttgggcagcagaaatcccgcaagggagggggaagacccagagtaaagcgtaggcacaccgtgaaagctgttatcaaagaggctaggggtatacttggggaatctgctgaagtattacctggggaatctgtggatgatcacgagaatgagtttccaaatggaaatgctgaggattctgccaatgtgaattctgaaagtcagaaaccatccaatagaagaataccagcaaatgtcaggaagcgtaactgggttcaaacattatctcaaatgactgtaagtgggcatggtggcgatgccagtgaaggacattctgatagtctaattctagggaagcgcaagagaaggcgacagaaggctgctgctccccctgcacgaactgctggtgaatcaagatataatttgagacgacccaaaacgttagtactctgatttagaaccataatttccattttattattgaatatgatagctgctaaatgtttttttttttttttgttgctatttttgcacttactcatggatgtgcactgaatttttatagtggagcaacaccttcatctgttagagctatgtctggtggtggcaaatagagtcagggagaggttgatcatgtaaaagatacagaagaggggattgttgactcaaaaacttctcattcacattcggtgggcattactaatgagaatggtggaagcattcatcttgagcacgtaagcttggtgtagcgtttaaataatgcagatagtttaagttctgtaccttgccccttataaacccctgtgtatgtgtatcttatgaattactgagttattgaaaattgggattttgatagtaggatccggatgttgacaagttttgaatttcagtttaatgttctttcccctcctggtgaacggtatcaaactaatgttaaattgcttgtcattatttgtttcagtctctgaaaggcgcggataaaagggacggttatggtggtggtaccatggggacctttgtcaacaatatggacttgagtgaggaggtgaacggaacagcagatgatgcggaggagaatgatgctgagtataggagttaatcccatagggaagatgctgctggtggagttgacaatgaggacgacaaagattacctgcaacccggtgaagcttcaacagggaagaagctttggaatttttttacaacaccacaagcttcttgaaaatgaagctgtgtcttgacctcatcaactttaggtatgatgtcggaagttatcttgtattaacaattggaagttgatctctaaattataaccacgagtggtagtacttaggaacctctggtatttgttaatagttttaggcattcgatagtgtagctaaagtttagatattggattttagctacctccccttggaaattgattgaatccaaatgtttgtatcccctgctaaatgtgattgtttgaatttatagtgagggtgctttgtgtatcccgttgtgtgaactactacaggtgtcaacagaattaatgccaaaagatatttgtaactgttattctcttaattaggagattattagcttatttagtgggctgaaaatcagcttgacagattgtaattgcattagcttatttagtgggctgaaaatcagcttgacagattgtaatcagtttgtatttatatgagaattctccagcaggagagcacaggtttttgacccaatcttctctgagtttaacatggtatcagcctaggttacgatcccagaacctagtttgcgttttttcctgttgcttttcagccttgtcctagtttcctgatcttgtttcactcttcttcacgttcttcttggtcatttgtttctcagtccagattatcctctcagtttttattcctatttttcctacatccatggcttccgaaaaatacgatgtcttgttggtccgccttaatggcaaaaactactcagcttgggcattccaattcaaaatatttgtcaaaggaaaagagttgtggggtcacgttgatggcagcactcctgcccctaacaaagaccaacatatggtggatcatgccaaatgggaagtcaaagatgctcaagtcatgtcctggatccttggttctgttgattcaagcattgtcctgaatcttcgaccttacaagactgcagcaacaatgtggtcttacttgaagaaaatttatagtcagaataacgcagctcgccgcttccagcttgaacacgacatagcgacatttaaacaggatagtctctccatctctgatttttattctcaattcatgaatctatgggctgaatacactgatatagtttatacaaacttgccttctgaaggtctaagttcagtacaaacaattcatgaaactactaaacgggaccaatttcttatgaaattgagaactgactttgaaggtatccgatccaatctcatgcatagagatcctgttccatcgttggacgcgtgcctcaacgacttgttgcgtgaagaacaacgtcttcttacttagtccatcatggaagaacagaaatcatctgttgttccagtagcatatatggcacaagggaagtcacgaacccatgacatgagtggtgttcaatgtttttgttgcaagcgatttggacactatgcttcaaactgtccaacaaaattttgcaactactgcaaaaagaatggacatattattaaggaatgtaaaatacggccaccaaggcgaactgccacagcttatgcaacctcaattgactccgctattcccagcagttctgccaatccagcacctgtcccacaaactgctactactgctgttccaactttgacccctgaaatggttcaacaaatgatcatttcagcattctctgctttggggttctcaggtaaatcctcttccccttggtactttgattctggggcttcccaccacatgaccaacaatgctagattccttactaatatcaaaaagtatttggggaatcttaagatacaaactgctgatggaaatcaattacctatcacaacaactggtgatatttcttcatctctaaccgatgtttttgttgctcctggtctcactagtaatcttgtctctattggtcaattagtcgacaataattgtcgagttcatttctcacagtctggttgtcttgtgcaggatcaacactcggggaagatcatcgcgaaggggcctaaagttggacgtctttttcctatccatttctcgttgtctccaagtctttctttgcctttagtctcttgtaattctgcttttgttgattaccatgtgtggcataggcgtcttgggcatcccaactcaaatgtactccatgacatgctcaaatctggttttctaggaaataaacacaccccatctcttaatgttattcattttgattgtattccttgtaagcttggcaaaagtaaaatcttaccttttccagcacatcagtcgaatgtaacccaaccttttcatatcatccatagtgatgtttgggggtggcaccagttatatctcatgctcgttataaatattttgtcacttttattgacgattatagtcgtttcacttgggtctattttctgcggtcaaaagatgaagttttttccactttcaaatttttttatgcttatgttcagacccaattctcatccaaaatccagattcttcgctctgataatgggggagaatacacctcacactcatttcaggagttcttgcaatccaatggcattatatctcaaaggtcatgcccctcaaccccacaacaaaatggggtagctgaacgaaaaaatcgccatttgctagatgttgttcgtaccctcttgctggaatctcatgtgccatcacgattttggtgtgaagccctttccactgcagttcatctcataaacagattaccatccccatcattaagtaatgaatcccctttcactcgcctatttggtcacccacctgattactccactcttcgtacctttggttgtgcatgttatgtccatcttcctccacaagaacgaacgaagctcactgcacaatctgttgaatgtgcttttcttggctattctcctcatcaaaagggctttctatgttatgatcctaaccttcgtcggattcgggtctctcgaaatgtaatttttcaagaaaatgtatatttttttgcaacacatcatggctctctctcttctccaatttctattctgccattgttctctaactcttctacaggacaaccatcatctagacctctcttgacctatacacgacgtagtactaccacccaaaatcaaccagcagaatctcatgggccctttcaagataattccttggctgctgatccagaacaagaaccagacccagaaccagcacctttacgacgtagttcccgcgctcgtaagcccccagaaaggtatatcagttccatgacagcaacattatcatctattcctattccttcttcttataaacaggccatggagaatgaaagttggcagaaagctattgaaagtgaacttctcgccttggaagaaaatcatacatgggatatagtgccatgtcccacatcgattaaacctttaggcaccaagtttgtgttctctataaagcttcgttcggatggatccatagatcgttacaaggcgcgactagttgtgcttggaaataagcaacaatatgggttagactatgacgagacttttgctccagttgccaagatgaccactgtgcgcactatccttgctcttgctgcatccaaatcttggccactacatcaaatggatgtcaaaaatgcattcctccatggtgatctcaaggaggaagtttacatcaaacttcctagtggtatgtcaacttcttctgctaatactgtttgcaaactaaaccgctctttatatggattgaagcaggccccaagagtatggtttgaaaagtttcgctccacactacttggtttttcattccatcaaagtcagtatgatccatcacttttcttccaaagaactcctaaaggcatcgtagtacttcttgtttatgtggatgacattgtagtgactcgttctgatcaagagtttatctctagcattaaaaaaatgttgcattcaacttttcacatgaaagagttaggccatctcacttatttcttgggtttagaggtgaattatcattctaaaggcatttttttaaatcagcagaagtatattcaagatttggtccagctagctggactcacaaatgctacccctgttgacactcccatggaagttaatgttaaatatagacgagatgaaggagaacttcttgacgatcccactcaatatcgaaagctagttggtagtctcatctatgtaactatcactcgcccagatatttcttttgctgtccatactgttagtaagttcatgcaatctccacgacacttccatttttcagcagtgcagcgcatcattaaatatctccttggcacctcaaggcgtggtttattttttcctgctaattcatctcttcacctccaagcatatagtgatgctgattgggctggctgtccagacacaagacgatctactactggctggtgtatgttcctagggaatgctcctatttcatggaaatgtaagaaacaagattcagtctcaaagtcatccactgaagcagaatatcgtgcaatgtctgcagcttgttctgaaataatatggctacgtggtcttcttagagagcttggattatctcaagcacaacccactccattgcatgctgacaacaccagtgcaatacagattgcagcaaatccagtttaccatgaacgaacgaaacacattgaggttgattgtcactctatccgagaagcatatgatcgcagggtcatcactctaccacatgtctcaacatctgttcaaatagctgacatttttactaaaacattgccacgccaatgtcacaattttctacttggcaaattgatgcttgtagattcaccagcatcaatttgaggggggatgtcaacagaattaatgccaaaagatatttgtaactgttattctcttaattaggagattattagcttatttagtgggctgaaaattagcttgacagattgtaattgcattagcttatttagtgggctgaaaatcagcttgacagattgtaatcagtttgtatttatatgagaattctccagcaggagagcacaggtttttgacccaatcttctctgagtttaacaacaggtggcaatttgggtttgcaagttgggcgtgtcaaggagtgggtaattccaactgagcacactaattattttaagacaatatataattgtccttcataaaatttggattatcatggctttcgatgctcatatatagttataacataatacagagttacgcagattcatgatacaaaattacaaatggtgcggctgacattgattagcgaagtgctaggtaacacaagtagggcctgtaatttttgtttcttctgtatatgactgagttcttataactccaaaattttgttttttcattattgagtgcagcggtgaagttgtgtttattcttcctccttatctgcgcatagcgtaaagtctctggacaatggatagatggttttttagtttttataattgagtgcaacactagggcatgccaatattcgtcgctggctttgcaaacctctcattggagattataggattttttgttcatgtttgttctaataagaacttctttgcattggaaaacaatggtcgcattgattggaattggaactcaccccaaaaacaataaatgcattgttagttgttatggctgggctacggtgcatgaaggtcatgggaagatgcactaagtagaaacggtcatagatagcactgttggcagatgaatgagagaaaaaagtaataatttatggaaagaaaagctgacaaattagagcagaaccaaggattacaaaagggtgcactaaactaaatttctacatgtcttttccaattaactcttaagtggatgctttattaggtgaaagtaccccttgctatgactcttccccaagtgtactaaactaaattatgtataaaaggttgtcttaaatttatacgtgtcatacttgtttgtgtttcaaaaagagaagataaagcttaatttgatattgtgtaagtagcaggcagagttgcacttgaattaggcaatcagggttgaaacatttcaatatttaaagacttgattggtacagtggtatatggaattagcagtatttgcaattctgtagtggctcaagactttgtaagacaggttgggtgttattgtgtcattgtcaaacgagatacactcctcaatgtgtgctgtggagtgagtatttgcactatatcgcaggggaggatggaatgcaggaaaattgattgaatgcctctcaaagaatttcagaaaataagatttcttacaaagtgcaggatttttgtaatgtagtttgatgcagggtgtattgttttgtttattttgtttattttttgcaaaggcaaacaaatgagtattataaaggtaccagaggtaccgaaagaaagtacaagacagaaacccctggttatgcactatttatcgcctatgtgcagcattatataaaactaaccagagatagtgagccatgcaaaaagaccaaatcatgtgctcgagaaggtacaaaaaagcaccgcaccaatgtgcagcatccccacatgatctaaagactataaaattatgtccccaacccaccttctaatctcccttttaaactgtctataacctacttatgtccccaaaggaaatgttagcctataaataggtaatggtaaaatgagtaaattaacgagggaatgagtcaatgttacgataattgaaatatatctttccagtaggcaatgaaagatctatagtaatatttatgctattatgatggagatgctgagttttgtgcatcaacaaatgctaatcttactcaatgaaggatgaagagatgacagagaatatgtatatataatatattcatcagctgccactgtttttgttgtcgaataagagcagccgagactgcataacactttggttgatcaaatatattaatattaatttctttttttgtttttcatttcaaacaatggtcatctatttgtcaagacaacatttttttttattcgaaattgcaatgcccagaaatacattcttttccaaaacgattatgactagtaccaataaaagccagtatactaattcaaaagtaaattatgattttgttttgtctttacaagaattatgaatacaaagactaagcgacataaaataagtaccataatctgaatcaatcatacacacgaattctgggtttttcataattgggacaacggctgatgtccaatatatcctcagagttacagactaaaattcctttgcaaactgtctttaattctggtaaatcgtacaattccaatttggttaacttgggaagtgcaatgttgtcggaactatctcctgcaaatatctccttcattgaatcacaacgacttacagatatagactccaggttttgaagttgtggcactaaccctgccgtcagcaacttctctattcgatggtattcctcgatactaatttccttgagatgagaaaacaccccccattgtgttaaaccagcaacatcttccttgtagatgacacttaaacttggcaagccaagaagatacaaatatttgaggttttggatattagtgcataaggaacaagatacacagaataaactctccaattttgtgcaatttcgaattttaatttcctttaaagatagagaaccattagatgacatagcagtacaaaagcattcccattgatgattgtcaagtacaaataatgtcaaaaggtctcttggcagttaatagggcaattcattgcagtctccaaacttgacatttctaggcttgaattcaacatcatccataagaccatcatccataaaaccatcatccataagaccctcgtgaaacatcagttcgctaaatattccaaaatagataatataggtttgaggtccatgaccactatcctggatttcttgcatataacggttatagttatcttgatcaagaaaacttcctgcaaaatattcaagcatagatcccttttacgtcttctaattttatatctgaccaaccgcggagatccagatattggatattagtcaaactgggcagtacgcatcctggtatcaatttcacctttgaattctcatcctggaacagatcaagccatttcaagtttattagattttgcaagccttccgtctcctagtggaggtatatattccaatttataacatttactgagcactaaagaagtaagagacctcaacttagacagggaatttggcaaagatgttaacccatgattttcagatagatcaagtagtgttagagcattcatgtgtgtgaaaaaacactctggaatatgactgatggaattatgagataagatgaaggtggacaagcgtggacaattaggtgatgtgccctcttcgatttcttttatcttgttacccgctaaagaaactccctccaaatcatctgtccattccctcgtgtgaggtatctttgtcaaattttcattacattttatcatgtaagtgtggctctcgttcaagatatggtacgccatgttcctcaccataccattcatttgtaaattcacatcattatccagcaacaaagaatggtttatgagtttatctactatgacacgtccctcatcgaatacttcttgcaaactcctatttccatttaacaacccactctcaacaagcatcataacccatagctttttgtcaatatgattaggaaacagtgcacactgtaagaaacattttttgatgtccttttcaattaaattgtcatagctacgttttagtacgcttaagatctcttttccgatttccaatttttcaagtttattcaatgcatgtctccaccaatggatgtcattttcccctttcatggtttgagccatcacactgattccaagtggtaaaccatcacatttcattacaacagatcttgcatactctagtacttcacaagaaagttctgcaggtgttccacggtgtccaagttttagcaaaaataactcacaagcttctttttcttctacacgagagagagggtgcattgttattgtattatcaaataggcaatccatctgtcgacacacatgtttcaaacgagttgtgatgatcaatttaatgtcattcactttaagaagaatccccaccttttgcagatcaatatattcccaaacatcatccaaaataagtaatgttttttctcttttctccaactccaatgtcaaaattgttgctcttgtcatctcatctccgtaaagcttaacctgtattgtttctgcaatgtgatgttgcaaattgaaaatggtgaaatcatgggaaacagtgatccagaagacatccttgaaagtcccttttcttttaatctcattcttgatatgaattgctaggaatatttttccaactccccccattccatgtatgccaataatgaaaactttctcatcctccaaaagatcccgcatcttgtacacatttgcacctgaccgcccccaaggcccctcttccaataaatcctcaaactcaaatttcaattcatcaagttcaggcaattcattagtcgagccagactcatgcagtgagtttttcgcatcaatagtcatttttttcaggtccttcagttcatccaaccaatcgtcaacttgtctattgcgtttttttccctggaactccagccactgtaattgtctatcagccttttcttcttcccttgttagataggataacaacatatttatagtcaaagcatcattaccattgctacctccgataacagcttctacatcacctgtttcatatacgaaaaatatatattggaatgtaataaatgtatttttttcatgtcacgctaacggcaagaaataaaaattgaacttagtttaatatttagaggaatgttaagcacaaatagctttattgtgtgaaataataaaattgattattgagaattaaaaacaaatctatatatgttgtatcacctaaataaaaaaataaaataaaaaagcgcatccgtgtgaagaaggaaaagaacatgatggaattggtgagggttggtgagtaagatttaagaacatattgaaatggcaactagaatgcgtacctcctgataaagctgacagttgtgcattgttttgagggttaactgaaccaccaacaatcatattgttttgagggttaactgaaaacaccaacaatcattttgttgtctcctacaacggcttcaatgcaacaagagatatggataaaacaaaatacagtcaccattttcaaacttcaacagaaaatcaataaaaaatatgtcaaatagtaacatactaatactattaatactaacttaatatcttaaagatgacagggtacttataataatgctaacaattaaggaaagtttcatatgacaaatctttctctctcgcacacacaactataaaattgaggaatttaaaataaaaatcaaactttttgtcacctaagaaataaaaaaacactagtgtacagagcagaaaatgaacaaaacgaattggtgagtaaccagattcataccttctaatagtttccgtatatgagatcgtttcagagaagcatctggtggagggaaccaacaactgaacatggttatcatggaaaggttaaagttgattggagcttgttccagaaaacgttccacatagtggagcaaaaagatgccacaatcgtatgcattttgttgctgaggcagctcaagtgacacgaatggaagacgtaaaaatttagaagaaacatcatccctcacattgttgtgcctctctttccatgcttcacatagataactttggaaaacattgcggttgcggagatcttcatgaattccttttcggtaatccatgtgcaagatgcaaggttctttgggagattccttaatttcttcatctctgtagcatgtcatcacttcagcaggatgacaaatgacaatcaaactccagtgaagactatggtttatgggaatgaagatataatccttttcaaaaaggttcacttttcttgtctaattgcttacacgctgaaatgctgctttagcatcacaagcaattgatggattatctttgcctaaatcaacaagcttaggaaagaaaaagcaattgaaaaagtgaaacctgtcctgtttatcagttgggagtttatttttcaaatacttgatataaaagtcaatgatattatcattaatgcatttctcaggctgtaaaagctcaatatctcttaaataacgacattaaaaaataaagcacgtgtgtaaagaatgagaagaaacacactggaatggtaactagaatgcgttcctcctaataaagctgttgattgtgtagtgtttgtagggttaactgaaccatcaacaatcacttcattgtcccctggaattctagtagtcagtagtattagtaactgacttcttatgctagcttattttgaaggttcttgtggggatcgttttgttgtaatcacatgatatccttcttattatatatattatctttttctgttaaaaagaaattattttattgtccttttcaatcacattaaagttaaagtatatgtatgaagagaaatcatatattacataaaaatgtaaaattaaacactatataaataagaagaatcataaatttaatctttaaggtttaaggtttttcaacattcaagacaagaagagatatagataaaaaaaaatcagtcaccatttataaacttcaacaaaatcaagaaagaaatgtaaaatatttaacatctaaatagaataaaaaatatcaaaatttatctttaaagtttaagaaagcattatataagagtaaaggtggcaactttcattgctatctcaaaaatgttaagcatgttacttaccttgtaattgattcaaggtatttactgcttcttgtggactgcttgaagcattgtgaggtccttgattggcacgatatttggggcattttctaatattgtttccatcgccgccagtgatatgctcttgaattcttgtagcacctccagcgaactcctcttcacaatggttgcacttccacttatcttttcctattttttcagcttcattccagtatttacttttcggccgaccccccctttttcttttactactacactctccatccattctttatttcctaaacactaaatcattttaatatgtgcctatctttaaacttgaaagtataggttaaaatgcactattcgtttttctattttttcgatacataattttgatatcctataaaaataaatgatatattaaaattgccaccagaaacttgtccaaaaaatcataaaatctcagtattctgttaaaatgacactacacgctccatccattcttcaattcctaaacacatctattatttaaacttgaaagtataggttaaaatgtaccactatttttttaaattcattattttggtatcctataaaaaaatatatgttaaaatagtcagcagaaacttatccaaaaaatactgcacaaaaccaaatcaaaaaatatttctgataaaaatttacccacctaaccatgttttggttgctttcaaagtttaatgcagagtcaaagcaaggaaatcaaatttcctgtaattaaaatcctaaatcgccttaagccttcaatcattaataataattaaagaaaaaagtggcagttgaatgtgtagctggcaggaagatatataagtgggtatattcatggaagggccaaagaaccaaaagggtgtttttttaaaaaatatttaccgatagagtgcgttttcgaaaatatatgcaaatctggtgcagggaggcctttaatttacaaatctggtgtgctgcaacatgcctggatcaggcatgttgcagcacaccagattctataaataaggccccccctcccatttcctgacttgcaccatctctctaaaactgctctgccttctctctatagttcttcggtggtcttttgtgcagcgaagctctgctgaagtgtcaagttgttcagataaaatcttgcgaacaagtaagcgtctggtctttatttgcctctgttataatttttgtagtcatgttgttatgatttacttatttatattgttagtgatgtacttgtgatttagcaaatgatgttaggttagcaaatgacaaaaaaattaggtagatacaaaattgtttaggtgtttgagactttagtgtttggataaaatgattagcattttgaatttagggtgaatgtgtggttattgtataaagggttaaataattaaggtttagggttcagtggggtaggtatgtgacgtctgggctagggttggggaagggtttggttgcatggtttaacatggaattttttttcgtgcatgaagttacagtaacatggctgattttgatggagctgattcaccccgctctgaatcggatcatgaggctaagccgattgatccgacatcttatgtcgtgcctaccccttacaactggggcgctttgcgtaggcgtgttcagcgcacgcacgtttcacaagttgtgtggaatgggggcgtggatcctcaggtattgaagactcgacgtggcaagctgtcggggggcccagcatatgacagcattcctgaggtcgttggtgatatgctgcgtgacgctggctttcttcatgtcgcacgtatgcgacatattcaggtatgcaacagttgatatcagtaatcaaatttgatctaacaataactatacttgtcaattgattaatgattttgttttagattgacggtggcctgattagtgctctggtcgagcgatggaggccagagacccatacattccacatgccacaaggtgagatgactatcaccttgcaaaatgtggttggaatcttgggattgcccacggttggcagagccgtcaccggattgactttgtccgactgggcgggggtgatcgaggacgttttcggtgaagcacctgatgaagacaccgagctgatcggtggatatctgcgactgacctacttcgataggcatttcggcgattggggtcagttggacaaggattttgttaatgtcacccggtttgcaaaggcacacatcgcccgccttcttggtgcatggctgctgtgcgatagatctggaggtagcgtgatcgcagcccgctattttccgttgttggctggggatttctcagagatcggagaatacagttgggcgtctgcggtccttgcacatttgtttagacagatgtgcgagtgtacagatccatcgaagaaggacatcggtggctgtcatatgctgctgcaggcgtgggcgtggttgagattcccaccaattgctccatctattccacagcgtacggacccacatgcacattttggacatcggtatgtgtgactgtatgtttaattcataacaattttaacatttaagcactacaatggttaacgttatttattttgtgtacaggtttaacacgctgcccaaacttacgacgcacgagttggtgtactataggacggccttcgaagacgtcgctcgagagaacgtatgtatgctgattgcttagtaattggaagttagtgtaacaccccgtgtatacccggtgtattatcattataataataataatacaccgggtatacacggggtgttacattttgtggtatcagagcggttttcttgatggaagcattatgtatggaaattgagtgttgcttttgactgttgtttgcatttggcatgactattgcatgtgtggacactagttgtgggcctgatcaactcactatttggtgtgcatgtgtagtgttatgacgaggtcgagaaacaacagtggggcaaccaatgcccaaccagatccagtagcggctgctttggcggccatgcagcaagagatggctgctaataggcagatgcaggaggcgatgcagcatcagatggctgctaaccatgaggtgaatgaggccttgttgaaggctaatcgggagatgatggatgagatgcggaccctgagagggggtaaccgggcatcttcagttcctcctactcatgagggtgatggtagccgtcaccaggctagtggtagccaaatcagaggagatcagatgtctcatgttgaggctgctaaggagctcgcagccagagggaagatgttagttgctttcaggaagcacgaccctccagttttccttggcggttatgaccctattgccgcagctagatggctgcaggatttggaccagatcttcactgtgatggagtgttcagatccccagaggttactttatgcgacctatatgttgaggggcgaggcccatcagtggtggatgaccacatctcagttgctgagagaccagggggatgtgatcacctggcggatgtttgaggcttgcttcctggaccagtactttcccagggatgctcgtgagcagaagcaagctgagtttgacgttcttgttcaggggagcatgactgtagatgagtacttggtcaagtttaatgagttggccaagtatgctcacttccggagatccttaccgatgctgacattctggctgctaagttccagagggggcttaggaagagcatcgaggagcgagttgtgggaagcggatctcgtgatatggctaccttggtgaggcagtgccgccaggtagaggacatgcttcgcagacatggaggcagtcaatcttttccctcagacagacaggaggggaagaagaccagcagtaccggcccacccgggaggggtaagggcaaggatgtgagagtctccacctcttctgggaggttcaagagggactttagccagagcggctcatctcggagaaggccagctccgaagtgttcagcctgtgggagggagcactggggaacgtgtccctcaggccagattgtatgctacagatgtggccagccaggccatatgtctcgggagtgcacacaggcaggaggccgtgcatcagtgactacagtggaaatgccagcacctaccgcgggtcgggtgtacacagttgatgccagagaggcggccaggactcctgacttgatcagaggtacagttctgatcaatgcttgtgatgtgagagtcttgtttgactctgaagctacacattccttcattcaggatgtgcttgctgataggcttgagttgcctaagtgttgcttgttctcttcgatggaggttaccaccgcatctagtgagagatgccgggtgagcacgtgttgcaaggacgtgcggttccagcttgatggcagagagtacacgattgatctgtactgcctggctatgcctaccctagagatcattctgggtatggattggttggccaagtatggcgtgatgctggattgttgtcagaagagggttgtggtgccttctgacagagctggttccagttccacctctttcctatcagtcttgcaagtgcgtaaggcactcagggaaggagctcagggctatatcttcacatgtgtggttgaagataagccaagtgttgatctgtcgcagatcccgatggttagtgagtttgcggacgttttccctgaggagatcactcagctaccacctgagagagagattgagttctccattgatctggttcctggtgtgggaccgatatctgtggcaccttaccgtatggctcctctggagttgagggagcttaaggtgcagttggaagacctgttgtctaagcaattcatcagaccgagtgtctcaccgtggggagcaccggtaatcttcgtgaagaagaaggatggtagtatgaggctctgtgttgattacagacagttgaataaggttactatcaagaataagtatcctttgcctcgtatagatgatctgctagaccagttgaagggagctacagtgttttctaagattgacctgaggtccagatatcaccagattcggataaagcctgctgacataccgaagacagccttccggtctaggtatggtcactttgagtaccaggtcatcccctttggtctgacgaatgcccctgcagtgttcatggattatatgaacagggtattcaggccttttctggattagtttgtggtggtgttcatcgatgacatcctaatctattcccggacggaaagggagcatgctgagcatctcaggatcgttcttcggaccttgaggaatgatcagttgtatgccaagttggccaagtgtgagttttggttatctgaggtgaagttccttggccatgtgatctcagcagctggggtatcagttgatcctagcaagatagaggcggtgatgtcttgggagagacccaaagatgtatctgaggttcggagtttccttgttttggctggatactaccggaggtttgttcaggggttctctcagatagtgatgcctttgactcgactcacccggaagggggttccgtttgtttggacccatgagtgcgagcagtgctttcaggagttgaaggaacggttgaccacagctccagtgttgacccttcctgaccctgaaggaagctttgaggtatactgtgatgcgtccaagcggggacttggatgtgtgctgatgcaggataagaaggctgttgcctatgcttcccggcaactgaagcctcatgaggaatcttatcctacccatgatttagagcttgcagccatggtgttcgctctaaagatttggaggcactacctgtatggtgctaagttggtggtgttcagtgaccataagagtctcaaatacctctttgatcagaaagagctgaatatgagacagaggcgatggatggagttcctcaaagactatgagtttgagttgagataccatctcggcaaggcaaatgttatggctgatgccttgagtaggaaacatgtgagtgcagcctgcatgatgatctctgattgcaagttggttgagcaattcagagacatgcacctgagtgtggctgtaggtgcccatggtcttgagctgagcaggaccaaggtgtctaatgacttgattcagaggatccgagagacacagaggcaagatgagactgtgagggccatgattggccaacaggatgtttcctgggaggattacgacttggtgatgtatcaggatcggattgtggtgcctaagggcgagttggtggacatcgtcctagctgaggctcacaagggccagtttagtatccatccgggtgccactaagatgtatcaagacttgaagaggaatttctggtggccagggatgaagagagacatagccgagtatgtggctaagtgtctcgtgtgtcagaaggtaaagattgagcatcaaagaccatctggtttgttacagcctttacaggtcccggaatggaagtgggatagcatttccatggactttgtagtggggttaccgagaactcagggtggatgtgattccatctgggtaattgtggataggctgaccaagtctgctcatttcttgcctgtgaagactgactacacggcggagaagttggcccagctatatgtcagggagatcgtgaggttgcatggtatccctgatagcatcgtcagtgatagagacccgaagttcacctctaggttctggggtgcgcttcaagaagcttttggtacccagctgaggctaagcacggcctatcatcctcagaccgatggtcagactgagaggaccatccagactctggaggatatgttgagagcatgtgccttggagcagggcactagctgggatcgatacttacctctggtggagttttcctacaataacagtttccatgcgagtttgggcatggccccgtatgaagccttgtatggccgacggtgtaggactccagtgtgttggaccgaggtaggtgagaagcagctccttggacctgagatggtccatgagactactgagcagatcaagatggtcagagataagttgcttaaggctcagagtcgtcagaagagctattatgatcaccgacacagacccctgcagtttgaagagggtgatcatgtgttcttgaggttgtctccgataacgggtgtaggaccggccttgggagtaaggaagctgagtcctaggttcattggtccttaccagatccttcagagggtaggaccagtgccttatagactagctttacctccccagttggcggggctgcatgatgtgttccatgtatctcagctgaggaggtatgtgtcagatccttcgcacgtagtagagcccgatgtggttcagattagagagaatctgacaagccctacaagaccctggaagatcttggatcggacggagaagcgcattcggagcaagaccatccccattgtcaaggttcagtgggaaggaaggacgcctgaagaagcgacttgggagcgggagcaggagcttcagcagctttatcctgagttgtttgacaggtatgttccttggttttgcggacaaaagtcctaaaaaggggggttgaatgtgatatccctaagtcccagcgcgtttggcgcgagtttgggcgcgtctggcacgaatttgaggccttttggagtggattatgcagaaaacactctgcagaattgtttctgcataatctggcgcggccagcgccaggtgtggcgctgatagcgccagggccaaaagtgtggcgctggtggcgccaggttggcgctcttggcgccgcagcctcgggaagctggcgctcttggcgccagaatggcgctggaggcgccatacagtgttgtgttttcccagccggcgctcttggcgccgcatgtggcgcggatagcgcgagaggttctggaacttggcgctcttggcgccggagttggcgctggtggcgctgtggtttctggaggttgacgctcttggcgccggagttggcgctggtggcgccattgtttctggaagtttggcgctctgagcgtgggagttggcgctcttggcgccagaggttctggaggtcggcgctcttggcgccggggtggcgctcttggcactgtggatctgcagctggcgcgatcagcgccagagtggcgcgatcggcgccgcagctcgggcagacccactatataaagcttatttcgcgattttggagccccaaccttctcttcttcttcctcagacctcccactccattgttgagtgcccaagcttggtttcttcaccatatctcaccaaaatccatccctaaagcttgttttgtgatggaaatcacctttaaagcttgaatccatcctccattcaccatcaaacccactccttgtgagaatccctttctcaagggaagttcgaagaactcgagctcggcgaggaacggcgacgattcgtgagtacccaagctaggggaagtcgtccttaggccttccttgcgtcaattgaggtaagaaactcgagaaacacctcttgatttgtgagttggagttttgggtgaatagtgacccacttttgatagagctagttttagccttgggtcatgttgaaacatgtgcttagaatgttgtgaggatgtaggattagctctcatatgtgagtttggtgaatgttgacttcatggctctatgtggtgcatgtgttgttgttgggctgagttgcttagccatttgtgaacatgctagagccttggcttgtggtttaaatggccttgagaggctattgggatgagccttgttgaaccataggatagatgaccttgtggttttggaaaggattgtgagtcctttcattgtgagcggttgtgaaccgtatatgcttgtatgccttgtgtggcttgtatgttgatacatatgttgtgtgtgccttgatagggcgtgacaccgagggtgtcagtggcgtgggccacagagcacagggagaactgcagagctcggctttgccaggtaagttctggacccttggggatgtttcctgtaatatcccttagtcccagcgcgtttggctcaaattaggacgcgtgtagcgcgagtttgaagccttttgggctggattatgcagaaaacactctgcagaattgcttctgcataatctggcgcggccagcgccaggtgtggcgcggatggcgccatggccaaaaggtgtggcgctgatggcgccaggttggcgcccttggcgccaaggtctctgccaattggcgctgtgggcgcgggagcggcgctccaggcgccatggtctctggtggttggcgctcggggcgccaggtcggcgccggtggcgccagaaccaccctgtatttcccagttggcgcggttggcgacgtatgtggcgcggttggcgcggggctctctggatgtggacgcccagggcgtgggatctggtgctggtggcgccagagtccctggagattgacgctcttggcgccggaggtggcgctctgggcgccagaggttctggaggccggcgctccgggcgcggggatggcgctggaggcgccgtggtcatcagcagctggcgcgatcagcgccagagtggcgcgatcagcgcggcagctctgactggaccactatataaagtgggtttcgcgatttttgagtcccaaacccctttctcttcttcctccagcccctttcctccattgttggacctccaagcttcctttcttcaccattcctcacccaaatccatcccttttgcttgtgttgtgatggaaacacatttggagcttgaatccttcctctctttcacctcaaacccactcattttgaggatccctttctcaagggaagttcgtagaactcgagctcggcgaggaacggcgacgattcgtgagtacccaagctaggggaagtcgtccttgagtcttccttgcgtcatttgaggtaagaaacttgagatttacctcttgattcatgagttggggttttgggtgaatagtgacccacttttgatagagcttgaattagctttgggtccagttgaaacatgtgtttggtatgttgagaggatgtaggattagctcttagaagtggatttggtgaatgatgtttccatggctcttgttgatgcatgtgttgttgttgggctgagttgcttagccattgttgaacatgctagagctttggcttgtgattgtgatggccttgagaggctattgtgatgatggcttgtgaatgccaaaccttgttgaaccataggttagatgacttgtggtcttgagaaaggattgtgagtcctttcgtgcttgagcggttgtgaaccgtgatgcttgtgccttgtatggcttttgtgattgatacatgttgttgtatgtgccttggatagggcgtgacaccgcgggtgtcggtggcgtgggccacagagcacggggagaactgcagagctcggctttgccaggtaagttctggacccttggggatgtttcccacttgcttgtgctctaccatactccgtgggagtagtggtttcattcatgactcatgcattgtgtggatgttgcatgctcatacatgtatatatgtgcttgtagctgtgcttgatattgtattaagcctgttgatagatcttctggccagtaagatagatatggataggagggaagcgcacctcctagtttggctggctctggttgactcggtcccgggatgcggagattccctgaggccaagagcatgtggtcccgtcgcggtgcagcctagtctcggaggtaccatatacgtgcatccatgcgaaggggtagcacccgatgggatggcacgggtgtgaattcggtttcacactgaggtcggcgttgacacggtccgccgtacatagagcaccgggttggcgtgcattgtatgtgtatgagaggccgggatggcccagtgttgtgatgccatgatgttgcgtcatgatgagtgagccagggtggaggagatgcctccaaggaccctgagcttactgagatgtttatctcaccccgtgtggggcttgtgttttcaggtgatgcttctggcagaggggagcagtctcagggcgggaggccccaatagagacggtaccagcttggccttgggcagctgtggatcgcttggagctcggctcagcggttgtggtgttttgtatgcttggagctcggctcagcatcttgttttgtttatgttgtatacccctgtgagggaagacatgtgttgtacatgtgttttgagttgtatatgctcagtttatgtatgccctcgtgtgaggaaggatccgtgggatcagttagcacttggatgctattctttgtatgcacctcgggtgccggcttttgtgtaactcggttatatatatatgatgtgttttcctcctgtttatatctttgagatatctgtgttatctgcctatggttggtttgtatgatctggttaagcaggggcatgtgttgatgcttgttgtgggttgtgattccatacatattgctatcgagaaaatatggttttcggttttatgcttccgcaataaacttgttttaaaaaggttttaattaattgtgattaagcgctaatctgatgattatacaatgataatacaccgggtatacacggggtgttacagatttaacctttatgtatgaatctactataaaaaaatgtcttcctgaatggaatagggccacaactttaatgaaaaaagtgagatttcatgcatggaataacttcgtgagtatcacaaagttattaattacatggatcaaaattggatgaatgcaagtcacatgagccaagcgtataaggaaggcgttgagtagttcttcgaatttgcctccaaaagaagtcgactggatgatgatggaaaatgtttttattcttgtataaaatgtttgaatgggagacgaaaagtactagacgacatacgagaacatcttctgtgtgatgagattaagaagaactatgcgacatggatatgacatggtgaattgacaaacatgcagagcgggtgccaaactgaaccagttgatgtagaaatgggagatcgattagagtatatgttttgtgatcttggacaagatttttgtcagcaagcacatgcctttatgtatgacatattggaaagtgattcgaagaagcctttgtatctggggtgcaagaagtctttaacgctattgccggtggtgttaagtctagttaaagtcaaggcaaaatatgggtggagtgacaaaagattcacttcactgcttaaggaagtgcaggatatgcttcaagaggaaaacacgttgcaaaaaagttactatcaggcgaagaagatcccttgtccgatgggtatggagtattagaaaactcacgcatgccctaatgattacacattgtacagacatttaaagaaaggcatctataccccaggtgtggggtatcacggtacaaaatgaaggatgatgacgattgtagcaatgaaagcacaaagaaaggccccctagtgaaggtgttatcgtatcttctaatcatttcaaggtttaagcgtctgtttgctaatggagataaggcaaaagaccttacaggacatgcaaataggagaaactgtgatggaatgatccaccatccgaccgatgcctcctagtggaagaaggttaatcgtttgtatctgaattttggcaaagaggcaagaaatcttaggcttggacttgccaccgatggaatgaatccctatggcagtttaagcactcagcacagttcgtgcctgttttgctagtaatttacaacttgacgactccttagttatgcatgaagtgaaaatacatcaagttgtttatagtgatatttgtcgggcccaagacaacaaggaaatgacatcgatgtttatcttagtctcttgattgaagacttgacagagttgtgggatgagggggttgtcgtgtttgatgggtatgaaaatgagacattctagttgtgtgcaatactattttgtaccattaatgactttctagcatacaagaatttgagtggatacagtgttaagggccatcgtgcatactctatctatgaagaagacacaagctatgtacaactaaaacatgaaagaaaaatagtatacacttggcatcgatgttttctgaaaccttatcacccttactagagattgaaaaaagcttttaatggaagtcaagagcatcaaagtgcgttgatacttttaactggtcaacaggttctttagcgggttgaggatatcaatactatatttggaatgacccaaaagaagctaacaagtaaaacttgcatatggaagaagaggtcgatattgtttgatcttccatactgtttcgatccagatgttagacactatattgatattatgcatgtggagaaaaatgcgtgtgattgtgtcatcggcatgcttcttaacatccaaggcaagaaaaatgatggtttgaatactcgccaagatctagctgagatgggtatacgtgaccagttacattcaaggtctgatggtaacaaaatatactagcctccagcatgtcatactttgtcaagaaagaagaagacaagtttctatcagtgtctgcgtcgtgtcaatgtgtcacaaggatactctttaaatattaagatccttgtgaaactgaaagatcttaaattagtttgcttaaagtctcatgatttccacgtctttatgcaacaactgttagccgtggcaattcgagatatttttcctaacaaattgaggcatgccagtaactcacctgtgctttttcttcaatgccatttgtagcaaagtcatggaccctgtaaagtttgatgacttggaaaatgaggctgctattatcttgtgtcagttggagatgtattttcctccttcattttttgatatcatggttcacttaattgttcatctggtgaggaaaattaaattgtgtggtcctatttatttacagtgaatgtacccaactgagcgttacataaagatcttaaaagggtatacaaagaatctacattgtcctgaaacatccattgttgaaaggaacattgcagaagaagctattgaattttgttaagagtacattgaaaagacaaaaactattgggcttcctgagtctcggcacgacgagagagtgggaggtaagggttcacgaggctacatattataactttgggtctaaaggtattgcaacaagctcatttgtatatactgaataacagtaatgaagtttttccatacatactttgtcacaaagtcttaatcaaggaaagtaacccaaaaatgaccaagaagagggtgttgaaagagcataagaagagtttcctaaattggtttaaaggtccaatctttggtggcgataatgcttttgaaatgttaaggaagttagcagatgggcctaaaagaaatgttagaagttgagagagatacgatatcaacaagtatttgttctacaccaaatcacaagacgataagagtacaatgcaaaaatatggggttagtcttagggttgaatcccaacactttgctactatacatgatgccaatccctgtttggagtccatgccttactttggagtcattgatgaaatctgggagcttaattatgttaaattcattgtgtgtgttttcaagtgtaagtgggttgatagcaatatcggtgtaaaaattggtgattcaggatttactttggtagatcttaagaaggtagcttatcagaatgagcctttcattatggcagaacaagctaaacatgtgttttatgttcaagatccttgtgatgaacagtggtcagtgactctacatggaaaaaccattggtcctaatcttgaagatgaggattcaacccttgatacttgtctcactcttttctccacacaaattcctacgtcaatagaaaagaagaagttgacgacatccacgcaagtcataatgatcatgatgaaggagaactaattaacatcgtataatgtaatctttttttatatttacttgtctccatatttacaattacataacttactatacttttgagttaactttaattaatcttgttttttacaagcacatgactacaccatcgagctcccctcctcctcctaagtcagcacctttgccatctgcaccgaagaagactagaaaagcaacacggcttagatcattggcatggagagaccagtggttcatgtggatactgccactaggaaatcttacggtccccacaaaaagaaattaaggacgtatttggggattgtcgcttgagacaaggaggatgttgcatttgttaactggaaaaaaaatttctacagctcagaaggatttgatttgggaggacattaaggtatttgaattaaatgttgaatgttattgtaattggttgtactgcaaatgttaaaatgttgaatgttattgactaactattaaatgtattttttgtatcgcagactgaatatgatattccataagcatccgaccaaagacgaagaagaaaatccttaagacggtaggagagcgatgaaggcaatttaagtcagatttgacctccaaatagactctggcacaaggcaaggaggaggactatgacattgttcatgaaaagtacggtatcaacaaagaaaagtggaaccaattttgtcatagtcgtagagacctttcatgggaggttagttgacatacattctttatgaatttgacaattatgcattattttcaagcgcattttgttaacaagtttctgtctagttatgacaggatgttaggaagaaggctcgggtcatctagaagctaaacacttcccctcatgtgttgtctcgcgggggttatgattcattatttactagaagaaaaacaaatgaaacaattggggcaagcagcccattccgggagcatagaaacaatcgttgatcctccatatcttattagacgatatgtgaagtaaaagatggctcgcaccaaaaattatggagagatgacatctgaggtggcacaagaaattgcagataggattctaagttattttttatttcaatcgttaatttttataataacaatagtaggttgtaaactcatgcagtattttgttgattgcagttttcccttgaggagcagtcagcacatggcagctttgtcacccatggacgtcaggatgtactgactgctttcattgggcgaccagagcactctagtcgtgtccgtgttgctggagctagtgtgatgatcagacaatactttggatcagcttcagcaagctccaacacgtctatgtcgatcaacacagaagagttgcatcgattaacaaaaaatattacggagcaactaacacacaaaatcagggcgagttggagcagtcgatcattgaaaaattgctcaacaactaattttgtccttcagccaaatgcagtcccaaatgcaatcctagggactcgtaccacctcctcagcctgaggttgatccttttgctgctcgtgtcaacacaaagggaagttgtgtcgatccctcggggcaggacccagacacaggtgcatcagacaggcatgggttgtatgttgatgacaatcctcccctcctagttgccttttgaagagtttatgaggggttgacaattgtccacaattgtgatgaccctaagatctggagcgagtggcgcgaggatccgcgcggttagcgccagatccttttagaagaaaaccctgctgagggtgtggcgcggttagcgccagggctggcgctggtagcgccagactctctggaagtggggctgatggcgccaggttggcgctggtagcgccagggtctcttgaagtccacgccaggagcgccagagttggcgctaggggcgccaactgggttagtgtggcgcggatcgcgccacaggttcggcctgtccacgctgttggcgtggaagtgacgctgatggcgccacagtttgtgcagcccgcgcggatagcgtggcacatgacgcggatcacgcgggaacgtcggttcagacttatttaaacggaaagtcgcattttgaggagaagaaaaatggttttcttcttcctcagagctccagcagccatgggagagcttcccaagctcccatgaccttgccttttgaccctaaatgcttccttaacccttttcacccctgagaaaccgagtgagagcgagaatccttcctccatatcctctaaaatctcagaaaagccccttgctcagaaggaggaggtagagctcgagttcggcgaggaacggcggtgtttcagctgcaccagggccagggagagcagcccagaggccttcctcttcagttctgaggtaagaaactcgagttcctccgattgattttggatttgggggtttcctgtgaatagtgacccatctaagatagagctagaattagctctgggtccagttgagagatgtgtttagaatgatgagaggaggaaggattagctttcagcttgtgatttggtgactgttggttttggctctaggctgtgcatgtgtgacttggactgagttacttgacttgagacatgcaagagccaaaatgacgggcttgaggtgcctgagtggccatggagacggtgtcttgtgatgtagatcgtccaagccctgagaaaccctgagtgtttggttgatgagagctgagatgctcaatgtgaatggctgaggctgagtctgtggagactctgaggccatggttgatctgaggtagaccactgagggtctatgaaaggcttgtagaggatgagcctgatgaaccctaggcagatgacctgggttgatggaaaggactgtggttcctttccctggggcagttgtggactgcctaatgagcttgttcatgtttacctgctggaatggtatgtgatttatatgtttgtatgccttggtagggcttgacactgtgggtgtcagaggagcagaccatcagacgaggctagagctgtgaggcacggcttgccaggtaagctcatcgttctggggtttttcccttattttggttgaccacccaagtggggtgaagtttgcatgctatgtttgatatatatatatatatatatatatatgtgtgtgtgtgtgtgtgtgtgtgtgtgtgtgtgtgtgtgtgtgtgcgttggaagcttgaggggctgagaacggttcttggagtggaactcaggccgttctggaagatggaatatgcgatgaaccctaggatagacactgagacagtgtgaggtgttcagtgattctgatgaggtgcagaccatgaggtggtctgtgatggaacctataggataccggactggtatcgggctagctgagattccctagctagaggaagagtttgaggactccctggaatagctgagattccttgggaggtgccactgctctccgcctagagtcctaaggatggattgccctgtctggaggttcctccttaggcagagatgatggaagtcctgagtggttatcctcaggccaggttatgtggaagtcctgggagatggagtgccccggagtggggtgatctctctcaggcagcagactggaagccccgagggattgagtgcctccgttgtgagatgatctctctcgggcatgcgacttggaagtcctgagagattgagtgcctccggtgtgagatgatctctctcaggcagctgatgggaagtcctgggggattgagtgcctcctgtgtgagatgatctctcccaggcagtggaaagtcctgagatattgagtgcctccggtgtgagatgatctctctcaggcatgtgatgtgaagccttgaggggttgagtgcctccggtgtgagatgatccctctcaggcattggactggaaagtcctgagagattgagtgcctcctgtgtgagatgatctctctcaggcatgtggtttgaagtcctgagggatggagtgcccccggtgtgggatgatctctctcaggcatgtgctgaggaagtcctggaggtgattgccctatatggatgttcttgcccaagcatgtgatatgaaagtcctggagaggccaggcagttgacagatatgttgtatctctaagagagggcttcccgggggggatgagagcctaaggcctcttagatgagccatatctggattctggaagtcctgagtagatgactcaggcaatgatttgttcagtggatgaggcgatgcctctttgatatagaaagtgtccaatggttgacacttaggtattgtacctctgtgagacgagtctgagatggcttgagagccaggatgaggtgggagacctctgatgctgatagcatccagtgactacccagatagctgggaatgtatgatggccaggatgatgtcctaggcttagttatgttttgtttatctgtctatgcttgggggtgaaccagggtaagggaggatctcccaggaccctgagcttactgagatgtatatctcacccctgttgtgggttgtggttttcaggtgcttctagaggagaggagcaaccacagggcaggaggccctggtggagcatgctggagtggtcatgagctgcagatgaagattagaagaatctttattttgatctctgtcttgtactctgtataaagttagggtgtgagtgtacacccgctgtactgtacatataatgatgtatgaccagatgtggtcttatttttgagcatgtatatgtacagatgatgatgtggttatatttgagattatgtttcctcctgatatctcttgttagttttctatgtttgtatctgcctatatttgtgtgtttctgtttaactggatcgacaggggcttatgtatgttttatatggtgtgtttttacattccatgcataatgtaatcaagaaaaacgattctatcgcttccgcaccgcgtttagttaacgctgatagcgctctatgatattattaatgataacacgtccggggtgttacaacaatgtccctttgggcaatgatcaagtgaaggtcggtgttgaggaagtccgagatgctgatgctcgggtccctatacccactcaagaggttcacttagtggggcaggccattaacaccatccttgcttgaccgacacatcttgtacaaccttttttagaacatgtatttccttttgttgtgttttttattttaaaaagaatttgttacagataaagtattgactgtcattgaattatgtttattaactgtgtaggataaacagggacctgagggaccttcaaaacctgtagataggtcggaacctgatgacgatcccctatactagatgacattgacgatcccacaacttttcctcaagcctatgcaggtgttgtgggattcaactatgtttgggatttataatgatgacgtccccttgtacataaaacatgaagatcttcttgaaatagcacacgtggtcaatgtctcaacatccctgttatacaaatgtgaattttgtaagtcactttacattatagtccattacataactgattgttttaaattgatgcaaaatttactttattttaatagtaataggcatatgaatgagttaagtctgcgatcaaggaatgcctctgtgtatggattccttgagccctagtccatatagagatctggacaatcacaatttgaatgtggggattatattaaaaaatggatgcagaattcatagatatatgtctacctaggagcttacttgaatgggtaagtaaaattgaactaaacaatttaaataatgtatgcactataataacttaatgttctccaatgcagtgcacattggaaactggtcattatatgtcctaaggacaatgttgtcatttggttatgttccttgcacaataagcccgacaactacttggaaggaattattaacaagtcaattgtattttgtaatacatttactttatcattagtatttgacatcaatgttttctcttaaccaatgctttgaagggattcaacgatagtcaaggaagtaaatccaaggctactgctgaatggattccagttactgtaagtaatttaaacaatgcttaatgtcttaaaaattacattttattactatatacactaattttcagttaactttgaatatcttattgaatttagtgtaataagcaaagaggaagcactgagtgcgactattatgtgatgcattggatgtcaatgatagtcctaggaaatttcaaggataattgggaaatgataattgtttactttaaaactatttcatttgttatacttgttaatatttacactgattaagttatgtttattatatcatgcagtatttgactaatccaagacatttggaactagagaaaataaaggcaatttgcattcagtggacaaaatgttatcttggagttaaaaatgaaaaactatgtgtttaagcaattttacaattgtagagttatgtttaattacattcggttatagatgttttacaattgtattcaataacaatataaagattttttttgtgaaactgcttggattgatctcttttttaatttgcaggtttgggtaatattaaaaaaacaagcaggatattaaaaaaatagcaaaaaataacatcgattttctaaacaccaatattatggtgcactcacaacatcactttttaggaaaaccgatgttttgctgcacctgacaacatcgatttttaggaacaccgatgttgtggtgcatacgacaacattgattttcctaaaaatcgatgttgtaaagtgcaacacaacattgattttcctaaaaaccgatgttgtgagtgtaccacaacatcagttttcctaaaaatcgatgttttgagtacacttgacaacatcgattttcctaagaatcaatgttggttttgttggattttaaggaagctgcaagaagaattgaagcaaggatagcttgaagttttagctttttacatgcccaatcattgatgacatttgtaattgtctaagtggctcaagttatttccttatgatccttcatgcatttgcattatcattctcatacatatatatctctgattataaaactaaaatggttaaatggtttttcaaaactcaagttctcatggttgaagtttttgaaatctgaaaaactcactgttttaatcgattacctgtttatgtaattcattacatgtgtttgttttaaatatggaaaagccatgaagaacagattaatcgattaccatttgttgtaatcgattacatagtgttaaataaaaaccacgcattgctgctttaatcgattaccatttattgtaataaattaccatttgcattatcatttattgtgctactttaatcgattaccataactcgtaatcgattacataagtcttttgaacattcatgtcttgctgctttaatcgattacgtgacgatataatcgattattatgttcataaatacttttccagaaagcttaagaacagtttaatctattaaatgatgtattaatctattacatttgatgaattaatcgattacagtctgttaaatcagtttttctataaatagcttgtgggtctgttgattgaaatatcccagaaatcattttctacgaaatacccatttactcacaaagctttagattctctgaaagaactcattttgagtgaaaaacatcttcattcaaacacaaaagtctctattgattggtgatgaatacctaagcaagatttacaaacaaaggttttcaagaaagcattttctactgttatgcattcaatctctgcttgattgtctgtgttcatctcattcatttgcaaaggatcatgaggtgatatctttcttgaaccttggactgtgttagttctattgtttgtttaagattttgagttgatttctcaaaacaaatagtttctttaaagttgattctggagaagggttctttagatggtagaactgagtagtgttttcagattctagatcttagaaatctataaggtttagattttgtatctttgtctagagttgacaaggaagatctgttgtaaaagcttgtaaagaacaataattgtttagtgaaatctctaaccaagagttggttggaagtaactggatgtagcctcaaaggttgtgaggtgaaccagtataaattgttggattctttattctaattttgttcatttctcattgtttgaatttgggtgatcaagaaattatcaacaaggtttattttctggcattacttgaatctcaagagtgattttggttggaagaaagattttgttttaaaagattttaagtgatacgatccttcttacaaattccataaattgtttttaagaaaattttaagtttctgaataaaccaattcaccccctcttggtttatttgattagcgttcattgtattttcaggtttttgcatattttactttttttttggtttattgcttactatacgacatcggttttcttaaaaaccgatgttatatagtgtatgttaacatcagttttgcataatcgatgttaacattgatacttttaatgtcggtgatttcaacatcgatttttaactgtgttgaaagttaaaaaaaagaatgatgttaaaagcccattttctagcagtgaagataaatatgaactttttaccatgtgagctcatatgtagtaagttatttcacttacgaataaataattagtctatcaataatttatatcattattattatcaaaactttaggcaataatggatcgtctagttataacatattggatcaacttagcaacaacaataatcaaattaaagagaatgagagaaagcttcaatatagcatatattattatgtttaaattaaacacatgcatggtgctaatgcaccatgggcacatgcaactgaaactggccatgttataaaacatacaatatagttgctagatccaactattttgacatatatgaagtgttattataaaatcaaggtactaagcatgagctataatagctattttgggatagaacaaacatttctacttaggaacaaagacaacatgatcctgaggtaggaagtggcagacaggaacaattcctggttgaaccttaagcacttgaaacgccaaatgcttgggattccactttgatgtgtcattgtggcacactgcaactgctttaactctgcttccattagcaccctctaatgggacaaaataggcttttgtggtttctgatttgtggcaataaaacactgcataagggtaattctccttgtgacaaacaacaatagccttgtcctcacccaacctcttaacccctggtgccattgtgtattgttgcaattgcaactcactctctttctctgtcacttctgtggaaacaacatcaacattgttgcttcctagcttggaagtggcgaaatcaaccatggactcaagtgaagtcacacaacgcttttcctctcccttaatgctaggcacttcacactcagtgatggtgttcttcacagtttgagcctcatctgacccttccttgatggagaacttggttaacacttcattcacctattaaaataattgttgtgaattaatatcaataaataattatatattatttttagtatcatcaattaacaattcaagatatgataactagattacaaatacttaaatgaaattatgataagattgaccatatgatggatttgaccaattattagtaaatagtccattgagaggtctctatccaccgttaggaaattgtaaatttattatttcataaattaagaaaatttacatattcacatgctcttaagcaattccttagaatgagcataaagctctcaaagaggaattgatgatttttcctaccaagctactctcatgaatatgagtgcaaattcaagttagtgtttgatagccttttaggtattatggttatactcacctgctataatcttgtatttatgtacattgttatattatttttgtcttaaatatatttttagtccctcaaatttaagggtttatttttttaatctctcaaattaaaatttatatttttaattccttaaatttgaaaaaaaaaaaagaattttagtctttcttacgatcaaaaatcggtcaagattaattaaaaaatacattttgcaaattaattgaactaaaaatatatattttaattcagaaagctaaaatataaagacgaatacaaaatttgaaagaacacaaaacaaatttaatctattaattttttccatcatcaccttgtttgatgaaaagggtatggaatcagcaactgatcgaggcaagaacaaggcatcaatacgtgaggtgaagtagcgagtgaaatgaaggttcaactttgttccgtggtgcaagtccttttccaagaagaagagtgccacgttggggtcatcgtgcaactgggtctcgctggctgcgtaattgtaaagaaatggagaatgtgggcccactccaacgtgcactggcttacccttctttggtcctgtgtttacgttcactccaccattgcctacgttcactgatgtgcccttgttgggctttcctttccctgtgttcacgttcactcctccttttcctacgttcactgatgtgcctcctggctttgttttccctgcgttaacgtttacgcccccctttcctacggccacagaggtgcttttgtcttctgccaaatctgcatatattcagattgttaatgccagaatttgattgtgcagttcctaaagagtagtggtattcttggagatataaaattaatttggtggtcggaataaatgacttggggttaagagagaatagaagaagggagtagtctgggttcgaatgacatttttaacaaaagttaataaattaatatttgtctatatctatttctattctttgtctctacttttattatttttccatgaaatgtcaactttaagcaattaataaagcacttgcgtttgctgatcactgataattgttaattaaaatatcaggtgtttagattttcctttgtctaagatcatgtgcaaggttttttctatcattatcaggtgtttagattttcttttgtttaagatcacgcgcgtgcaaggttttcctttttccttaggagatgaaaaatttactaacatattatctaacactcttttctaatatattttattctattaatttaaatttagaatcagatctactagtactgatgaagaaataaaactcatatattcaatagattcacataaatttcatttaataagagaataatgagaaagagcattaaaaatgtgttactgtaacaaacgagtcagtgtttgaaaacaattgctttagtcacaaagttattccaaatagtactatttttttttttttttttttactgatgatgttaggactcagaatgtgtaacgtatgaaaatggtatgaaattcaaaaacaatttgaactttctaattaaaaactatctactaaatgaactgaccagggtgaaggatatctgtaatggctttcggcattggagcggtgggaagcttcgacttccagtaaacttcaggggacaaggttgctgcatgggttgccaccactgcaagctgcaaattaaatacaaaaccttcattagcataaaggccatataaacattactattatctaatatggaaacatgtctgaaataattagtatcccatgatatatcaaagctttaggggttcatgaatattgaataaaaaggaaccaaaacttgaagacaagtggggaaaataataaaacacgtgctaattcaatattatagtttggaaagtgaagctcacattgagtaaagcaaagatagataggagaggcaacaccatattggaaattaaccaaaggtgcaaccaaaagtgcttggtgaagtagagagaaaatttagagaagctaaaaaaagtgaggcttgagataggaatgaggatccttgtgtgcctcacacagcatttatatagctgagatataatcacgcgaatccaaaattcaggttaagggtatgggtcacaaataattacacttcaacattcataattgtatatcttttatatattaaagacatctccaatcagtttttatttttagaaattaatttcatttgagatagataaaccaccaaaatgaatacaacttctctcttgatataattaagaaactcaattgtgtaggactttattgatacacgtagttatgataacaaattatataactacctaaagttttaaaggaaaattaaatgtgtatataacttcttttaaaatctgtccttggatataaatatataatgttaaaaaatataattttaaactcccttataacagttttaatttctactaatgttttcttaaacacttattaagaaaaaaatattacatgtttctaattttttaaaatatttcatatatttatttatatgtaatattttttattaacattataaacttactataaaaaaatattctggaaagaatggattccagataaggtcggttgaatgttcaaatagcatccgatcgatcgactaccaaatttgtcatacatttttaataacttcaactgtcgctgcttcgacgactttaatttgtcataaattcttttgaacagatggacaatgagggtaaatttatatttctttcaatatagatgtattattaataatttcttttaacttaatcgacaatattttattgatattatatttacattaatattatttattttaaataaatgcattaaatatatgaatttaatcagatgaaagtagaaggttttttttcttacaatgtcatcttattataaattttcgtgtaaagtatatttattgagttttataataattctctcaaaaatatatatttttttagttgataatgtaattttttttattgatagtagataaaaattaaactcttaaaatatattttaattttagttatatatattttaataaatatgatttatatagtactaccctcaaactttttaaagcatgtctcagtttttgctgtattgatttaacaggataattcgatgcatcaaataacaaacaactactcaaaatttattaggggcagaacgatagttgttagtcattttcaaaggtaaacaagcaggccattaaagagtttagacttttttttttttttaatgtatactcaatgtaactttttataggaagtaattttgttcaactccaataaatcactatgggaggaaaaatttaaacgtattcatctaaacgtggaaaatatacaagattaatattaattattaatctaaagtataatttttttatattagtatctcaatatattattattagtattatttatcaaatattaatatgtttcgataaaaatttacaaattatttttattctgttatcatctagtaatagtaatgatatctatttgattataaatgtaaatattatattaaaagtccaacattatgtaattaatcttctagatataaaaataactgaaatgagatttgcttctttcaataaattttttttctctatgcactgtcagaaaattgacccaacatatttaaataactcaaatatctattaagtatgttgacgctcgttggaaataataaataaatttcaaaaaaaaaaaatccttaaactaattttaatttaatcagaaacttttaaaatgagtttaatttgaaactaaaaattagaaaaaatataaattttaaaaattgaaaacagcttattgtttttaaaaagtttaaaacttacaagtaattaaaaatctccccaaatgtttagttattcattaattgttttctagaatcagtacatatgcatgcatttcattcagagtcacgcaacgctccttgttcttcttacatacacgcactgaataattttatttttaataataggaagcgagaattttattcagaagaaaaggaatcagatacaaatctttggcaatatgaatgcccagttgggatggagattcatccaagcagcacatatcctgaaaatcaaaggctaaacccgctgtctaaggcccgtctggatatggtttctcgtttttagttttcaaagttttaaaaattaaaatcaattttagttttgagttttgaatttcagtttattctttatttttagtttttgaaaggatgttataaattgaagataaataaaatgagtcaatcattttatcttatctaaatgtattatcaaataatggcgggggctgaatagcggattggaagtggcaacaatgacgttggtggcgatagtggtagtgggagtaaactagtggcggtcacaatggtgacaacggtggtagtggtgataacaatggtggaatggcggtgctagcgacgacgataatgataggatggaatagtgttagcgacaacgataatggcgattaaaggcaacagaatgatggagtcgacaatggtagggtggtggtggaatggtggaggcaacaatgtggtggtggtggtggtagtagaggtggcaacaacggtgtggtgacggtggtggcaatgacaatggtgggggtggcagtggtggtggaatggtggttagaatgcgtttttaaaactaaaaatcatattcacaaaacttttttttttagttttgaaaatgaatgtaaaatattttgaaatttgatttaaaaacaaatttagcttcattcactactaaagaaaatgaattttacgatgccaaaacgacgtcgatttgcaaaacctgtcttaaataggaggaatgcaaaccataatggttttacaaaaaaatgtcgtggaatgctacgttcaacaacagttatgtagataatcgtcgttgaacgcaacattccatgacgtttttttgtaaaatcgtcatggtttgcattctttctaatttacaaaatttccaagtacacattcaatccctcactcactcacactgacccgcgtgcccttcctccctcacttagctggtgccctcactccctccctcactcaatggtcgttgaaggggtctcctgcaccgcactgccatcatgtgccaccattgtcatggaggtaagaactaaccctctattttgttagttctatttcataacaactgaatgaaaatgagtctgaatttggggttctgagtcttaggaatggttagagttaggacccaacccttctactctaccttagtgtcatcagctttagcatcatcaggcaaaagcaagcttttctgattcacctcttaaacctcctaaatttcatgttttcttgcacgtttgttgtttatacttaagggtggcttgttagttacgtaagatagatgccaggcatttccatcactctctatctctgtttttcttggtgggtactatcttctttattatctttgatgcctttactttattcctcaatgcgtagtttacttcacttcagttttgctcacattagccttggttcattaattttgatgaaaaatatcagggatcacctattaacatcccaaaatttcagaactacagttaaatattaaagcaagtcttaggccaattgatagtttatatttgagttatttgggtgaaatgtttaagggaaaagaccatattaccctttccttaaactagaaatgacagaaatgcccttgaggtcaaaatgataaaaatacccctggatattttaaaaattaccaaaataccctttagcctagaaatggccagatagttttgggaattctgtaagaacttgataaaagacagtatattcctagacaacaaattattgaaatatttggtgataagaaaaccctaaattgaaatttctaggaattttggtagatattttgaaaagaactcaatccagactacctcagacatcaggaaaacataggaaaataatagatacaatctatagaattttctcttaattatgggataaatagacttctttaataagctagtttagtaattttactaattaaaagcgaaatggaccaataagaaattagaattaagctattacatgaaataaggaagaaaatttgttgatttagttctaggaaataagccttaaccgtatgatataagatcaagggagaaaagctttaggaaaattcaagaatggacacatggagggttaaggagcttagcacattttcattggtccatgtgtaaaggaagtaattaatgttttgagatatttcatgaggaaaagcctattacaagcaagatatcacacggatgagagagaaaaaaaaacaaatggaatgccttgatattaggagttgcacgtgaagaataagcaagggataaggaaaatgtagaaaactcaagaagctagacacttggaaggaaatgattcattagccaataaaaactaactaaatggaaagtagtcataaatgatacaagattttttagcaaaggcatcttagcttaggatgtgaatgtgcaacaattcctcaaaggcatcttaggatagcaattttatataaatgaatgtgaggaccatggaataaggcttggaagcaagaagtaaccgtgcaaaaattcctccttgtagcctacatccctttcaccttgtccttagcactttaacacaaaaccaagcccactagccttaagaaaatcccacgtgaagaggcaagatagaaggctgtccaaagttctaaaataaagcaaggtatgggaagtttatgataaatatggtttaagtatgctaggattattcaaattgctttagaattaagctttgtttattaggtgtatgattaattgcctcaaagaactaaggttggtttaatgaattgattaattgaagaaataatttgaatttagtttaataaaagattggtagtatgaatgattaaaatttagcttaataggtaattgtttaattgacttgaatatctaaggaagtaatggatttgaatgataattaaaggaatattttcactaaagtttatgtgttgtttattgtgctataaattcttgagtttacttattaaatgttatataaaaagtatgatggaatcatgtttattatgttgaactatttgagttgtgatgaattatgacttgttctgagaaatctatgaagtggactgtggctgtataattgggattttgtgtaaagaagtttatatattgttctatatacattaaactctgtattagattcatgttgacaaatttgagcataagagattaagagatgagtaatattgaagagaaaaaatataatcatttatgatgttcatatgcatatgcctggcgggggctaaagaccgtgttattttatattttgcctggcaggggcttaagtccgtgttattttatattttgcctggcgggggcttaagtccgtgttattttatgttgaactttatgaagattgatgttggaattttaaagtataagcgtatgagataaaagagaatcattcatgcgtgttattttatattttgcctggcgggggctaaagtccgtgttattttgatattttgcttgatgaggacgagaccgtgttaatataagaggctgagtatgcatcatattttgacaatgctatgatgacttcctatatatatttttgaatgactatttgaatgaatttctgtatatattttgtgacttaaattatgtttatcataaacttaccctgtcttttgtgtctgtggttgacacctgtgatgatcccaatttatttgggcgagcagagaacagtaaagcatgagcaaaggatggtggtgaagaagatatgatgaagatattttgatgacttatatttttaggatgtgtattttgtattagactttctaccagtctgtatattatgttggcatgtattttgggactgtatgttgaattgtattttggattgtatatggatggactgtatttttataaatagaccgtggtgaggaagaactcgttcacgataattagtaaaatttgaagcaagaggaaaagaattttccgtaaaatttatgactaatatatttttaagaaagttggaacggaaattttttctaaaaccaataaaataagatagtaaaacgaggcgttacaaccttagtgcaaaacatggaaaatgtagtagcaaattaaagttgattagctagcaaggaccacatgaaaataataagttgaataactagcatatggcgacaactacttattttcaattgagcaatacttcaagaaacaaagatcagttggtatagctagtactttagacatatcaaaatactagtactttagacatatcaaaatatactgaaaccacaattgatttcattaaataaagagagaaaaagagaaaaattgagaggaagacaatttttttttgtaaaacttatcctttttagctgaaaaatggtatagctagtacttgacacacatgaaaatatacatgaaaccacaatttttttatacacctgaaaccatagttaatcatagtccaaataccacactttttaacatgagaaataactacttcagctcgtggtttgttaccttattaacaacactaaaaaataagtttaataattaaaaggattaaaacaatatgtatcaaaagacaaagaaacaaacaaactgatgaaaactctgcaacttaacttcagagaaaattcacacataacttgaattgggacaagacgaaattgctatatcaatgatcccttctaacatcaacaccacactcttcattgttgggccccaaacaggttcatcttcgagataccaaagtgcccccttaacatgttttccacaatatttttatccatggaaaggaaaaacttattaagttgtccgataacaaaacacttataaacccagttgaagagaataaccgccctttcaaaggccttgttgtcttttgcactccatgagccagtggatgacattgaccaagatgtcatttcttcaagacaaaatggtcaacaaaaaaactttaggtttgacgatcactatatagagaatgatcttgtatgtcaacaggaattattcaatagttgatactgaagagaggaaaccatgtgtgctcctttttataacaacaattggagagagtgaggtggggtggcaccaattggaatgcaaatcttgccaaaatgtagtaagaatttgaatgatttgactcctcagaaaccccaaatagagcaggaccaagaattgagctgcattatgggagaatcagtatcttcaaaaaataaaattaagtgactgaattgatagaacttaccaaaagtacttgtttttatttatttatttataccttttttggcttcccccatttacttttcttgttatacaaatcaagttaaaattgcactttcttatgtttgaagctggtggatataaagataattaagagccttaaatagagtaactccacacattcataataaactgtttttgagttgagaacacttcctcaagttgatgatatattattaatgtgttttttttagcagcttagagatatcgcgtggttgagaaaatagacacaaccaactaacatgttagtattaaattgtaaaatttcagttgtgcttcagatagtaaaaacatatgtaagagtaagaaccaccatcaactagttcacctaatggctaactttatttgattctcttgcttacatggtcttcaagtggggcgaagctcagccaggtatcaaagatttcaatgcatcacacaccataatatcttgttcagaacaataccattttgcaaacatggtctttattttgtgtttgaggatgattacttagatggcccaaaattttgtgttttttatttttatttttaattaggccaatgtatcctctcttccatcaatataagataagttctttgtaagatcagttgagaggtgaccaaataggtctgcatagtcattcctggtcagattcccagttcaatatagttttgacaactaaacttgatagaatcctaagttagaaaataatgttacaaataatgtaccaatacaaagggaatttgctgccacctgttcatatggaatcctaaaactaatttaaattgagtaaaatacaacagttcactactgaaaaaggccttttaacgataattcttaaggccttttaacgatggttgtacaatcgtctttgaagcgagcatcgtcgaaagccaatatttttgacgacggttttcaaaccatcttagaagggtataatttctaagaagattttgtcaagaaccatcttagaatttttttttaacaaaatagatgtttctaagacgattttccagagaactgtcttagaatatcttttttaaaataaaaaattgcccatattttattattttataaccttaccaaattattattattattattattattattattattattattattattattattattattattattattgtctcatttttaatataaagtaatcttagccttatttaactaattgtaataaattatctatacatgttaaaacatacttttcagaaataaaacaaatatcaagaactttattatggaatgtggatgtcaaaactactcagcaagtcaagaatagaaaatcagaaccacattagtcaataactaacctctatactttctgatgttgtcagtattgaccatattctctccttatctatagcttgctgcagttgcctctgagtaatattagcccagaaataactccttctaaaccctgctcaactttttctccacatgttgtagcttgaggaccaaaatgaacaagaaattctctgtgcaaaccaagtttagtgattacaataatgcttgtcagtgcaagcatgagaactgatatgttacttaagctttttaaatccgaggacatattttttccagatctaggaaatccattaaaaggtcatttctgcattgtctttaagaataaatacaaagcttgaaggaaataggaatataaaagcaatgtttcaaaataaacaaattttaaggtgaaacatacaaggaagaggtagcagtaatgcaagaatccctttcaaactaattaacaaaggatgtcactacatgtggaacttgcttggaccaaaaccattcatatgctttcaaatacttatttgatagtttttcgctaattaaactctctaggggagcagatagctgaagtaaactagatcaataaaatatttaacaattttaaggcccaaaccaactaggaagtagaataaaatataaaaactaaacaaataaagaaataaataataaggaatgaaataaccatgaaacatataaaacaaaagtacatcaaagatcaacagatagtctaagtagttttcaaaagtaaatatgacctgggaagtaattgattcgaattttgtacagtttatgggataagccaatcaattcatattttttagggagtcaaaaagatctaacacaatatcctaattcacacacactttcacaaggaaaaaaaaggataattgaaagaaagtagtagagataaatctataaactacctaggcagcatacaatataggattaacttatatcaaaaagcacagatccaacaatagtggcaagagcaacaacatattctggaaaggtagtatgcatggtccatgttttctttgatgaaggactatcagtgaatgtgtaacgtcctgaaatttcaataaccgaaaatagatgttctatgtatttcttatgttatttgactatttgattaatttataattagttgaaatgctatgtggattctccatgtacaattgtttggtgtagatgtcaagttatgcagagtttgtttgagctacgttgaattgtgtgattccgagtttgacccaaaaacctattttagtaaaatcatcattatggattggttaaccgttagatctccttccaattttacaggtatcttcctaacctatacatataactttttaccgttgggattgcgaaaataatatccggagagtgagaaattaatttctcactgaagcagaaattttgaaatttgggcagctcgcccaggcgagtttatgaaggctttttgactcatctgggtgaggaaagtcggcattaaatacgaccatctgcatctagatcatgaaaatggggaattttcctcccacaagcgttccctaacctccctccatcatcctccaccacccacaaccaccgaagaccaccacggactgccattgcttgccatgagatcccggcactgtgaagaaccttttaattggagcggaatcttcaaaaattttctcgaagttttggtagagaatgaagctcccaatcctcctttcttggtttccttgatgtaatcttagtttcttttgtcttctcctagctagtttaagcttctattagtatctcttgtgttttgggtatcgttgttgggagttttacacttcctttgaaaaaccctttgaaaatgagatgttataaaagtctcatttttatgaaattgatatcatttatgtggtccttgttgaaccctagtcgcattggtgtgattggaatttcaaaaggatgtcttttaatgtaaactcacaaaacacccttttagcccctttttgaatttgagtgggtatttgaccccaaatgttaatattgatcttatattggaaatctatattaaattgtcttcgatttggtagatagagttcttcgtttgaacgaaaacatgcgtattgaaggatctctaaaacaacattgtgaggttttaacaggagaactcctggttagataagggaagtttactatgttggtaatagtttagataccatagttggggcccagagagtccaactacgaaaagaactgtctgtccctgctatgtgctggttttcaagaaaaactgtttttaactgtgaacatttcaaaatcctatagatatagaatactaaaaataaaaaaaaatgatttttttgtttatcttcatttaataataatttagattaggatgcgatgtagttatgattgatgtgtgtttgttcttatatgtgctcgttttcaagaaaaattatttttaactaatgggatgtgatgaattggcttgttgatggataaaactataaatgatattattattgtgatgattgttgggaaaagtcttaattacagaggagactttgcccaaaattttataatatattttcctatttaattctttattaatttttaaatgggcataagagtgtattttctatattgtagtcctcctctttaatttagaattctcctaaaataccagtctaatggtaatatggattgtggatgaatgaggtgatattgatgtcattgataatgttgaaatgagatgttattgatgtgttgatgatgattgaatgagataatgatgatgtgttgatgatgattgaatgagataaagatgatgtgtttgatgatgtacaaatgaaataatgttgatgtagttgatgatgttgaaatgagatgactttgatatgtatgatgatgaaattagatgatgtgatgtggatattgataatgacattgataaaagattatgttggtgctaataatgtcattatgtgatatgtatatatattgacacccatgggggtgcatgactggttacccttacgaggaaggatgtgttctttgtcgggtcatgcattgatggtgcccgtggttgtcattgtgtgatgtggatatacatggatacccatggggggtgtatgactggttatccttgcgaggaaggatttgttcctagccaggtcatacattgatggtgtctatggttgtatgttgtgtatgtacacgtgggatgcaatgactagttggttacccttacgaggaagaatgtgttcctagccatggtcattgcatcaatgagcccaagttggggtggtatgtatgtacatggggggtgcatggtgggtcacccttgcgaggaagaatttgtttctggccgggtcatgcattgatgatgcccatgtgacatacttcatttgttttacggaaataagatgattggctgcagagtacagaggtactggggggcacaactgtttggaactcctttaatgagacccatggctgatcaccagtggggggagcggcctgtgcacgatagagtgaccctaacatcctgctacatcatctttttgtgttggactatttctgggatggtaccacattgcatgctgagagatgagtcaggagcatgcatcatttaagcattataggttgactagtggaatgcatttggatgactgtccttgttagctgcatgatgaactaattgagtattgtgatgatgtttgtgatgttttgcattgccttctctaactgctgttatctattacttgttggttatacataataaactcacccttgcgtttgttgtaccgtgtggttggtacttgtgatgatcgcgaaccttcgttcgtgtgagcagatgagcagccttaggtgactctggagggagattctttttagttggagccgtcaagccaacgtgatgacgttgggtttctttttgggaaagagttgtgttttgttaatcaactcttccttagttagttctttgactttttgttagatatgtaatttcagttgtattacatgtaaaactaaaggaagttttaacatatggatgacatataccaatttaatatatatatatatatatatatgtacatatgtgtttaattatgaaattgtgatacgtgtatgataattgtattatcgcgaaaaatttaccatcattttcataatcaatttaatgaagtttttattaaaagttaaatattgtgtggtaagagttgatgatacagtagcgatgaggcgggttgttacagaatgcaaaagactgattttaggacaaatgtaaaagaccagaatgagaaacagaaaatgaaatacttctaagaatttattaaagggatacacaagagcaaattaaattttgtaaccttgattgcaatcaaaacaccatacttacaagttagtgaggttgtttagaaatgaaactccaaaaggaattggccattaaaactactctatgaggttgtttagaaatgaaactccaaaaggaattggcctattaaaactactctcttacatcaccatgtcataattaaaaaccattcaatcaataaaccaacaaataaataataatagatttaaatttcacaagacgaaagattcatacagtattttatctaaaactatcaaatatattaagtattttaatttttttgtcataatattatatattttgaaaaaatttacaatatttttttctataaaaatattataatttttttctcctactcagtaaattttctgaatttatccatgattgatagaaactttaccatttcaaacattgtattaatatttattatttattctaactctctattctcatcatatcatattagttattgttcttaaaattttgtcttttatatttatctctcccgaggtgttaagtaggtgttgcactggtgccaattaatttttgtttaaaaatgttcaaagttcatttcatgctaccagaggaattaatttttgtataaaaaaggtgtttttatcataatgctaaatagatacgagaagtagaaagctttgccttcacatttatctgaaatagcaagactaagggataattgttaagttattatagaagaaatattaggcaattatatcggtcagtaaggtagttaggagttagcttgctataaataatagtgtagatactacatagtctgtttttggaagctcattgtagtggacaatgcttaaactcttaaaatctcaataagtcgatacaaaatattagtttctttctctctctccacctctctaggaactgtgtgcacattttgttcttttttgggtaccaattgcattaatttgtattagagctttccatcaatgtctctcagctacaaacaagcagctggaaatagtatgaacacatttgaggatgcaacttccaaggcaatactcttttgcttttaatctgcatcttcagcatgtgtttgctaagacaattctaatgaatactcaagtagtttatcaaatagtgcagccatgaacatttttgaaagatcttttgactccttgattgctgtcacctttggtcttgttaagcactttaagatcttgatgtttaattcttcaacatcaaatgtcttttcaagaccaaaaagatgatttacaatgtgtgtgaatcttgtctagagtagagatatgttttctattgtgttcatcttgaacatctcatactcatgaatcaaggcatgcttccttgatcttttaacttcatgtgtcccttcatgagtgatttataacatctcccacatctccttagcgcttttacacctaacagttctgaaaaattcattagatgaaagtgcagaagtaatcatgttatttgctttgaaatcgtattgaactactctcttttctgcatctgtcatctcatcccattctttggaaatcatttcattatcaacaatttttattggaatcaaaggacctttttatattgcattccatgcaccagggtcatttgattgaatgaatatttgcattctatttttccagaaactgaaatgttctccttcaaacatcggagaacgattaagggagacaccctctttgaaggtaatttgtgtggtattcattttctttgaaaagagatagtgatcttgaataacactcaagaacatgctcttgataccaattgaaaacagtataaacacacaataaccaagagggggtgaattggtttaaacttcgtcttttaaaatctttaaaacaatcagagtattaagatcgtatcacaaacaaccttcgaaaactttcagtcaatcaaataccacctttaaagaaagcaatagctgaaattatatttctgttgattctgaaaagattatccaaatgaataacaatcaatgacagcaagaagagataaagagaaagtattcaacaccaagaactatactggttcacttctcaccttgagacgttatatctagtttcttccaaccaacttggttagagttccactattcacaaaattcttttcttacaagcttacaacaatcacccttaatcaaacctagattatgatcagaaatctaactcccttagactcctagtgatcaagacatagagaatctcctctctactctttcctttagagaaacctactctagacaagccttaagaaatattttgtaatagtaacaaacaaactgaaattctaaaatgaattacaaacaaattttaatggcaagagacaacctgatgattcaaagcatatgaatgcatacaatttaccaatcttggtccaggttgaatgaaaacaaatttcagagcaaactctccaagaatttctttagaatcttgtccaagaagaaatctttcaatgtaacatgaagatttagaatttgtgggacaagagctcagtgactcaaagtatctcttttcatttcagaagacttttgaaaatctatgaaaattccattgtgtaatgttttgttcatttcaaaagacgcaacaactttttatagaaaactgttgtaactgaatgtaatcgattaaatcgtcaatgtaatcaattaatttcagtaatgtaatcgattaataacatatttaatcgattaaagtgttcttgaactttctggaaaaagatatatgagcaaaataattgattaattcaccatgtaattgattaacataggaagtttgtttcaaaaacatgtcaagtaatcgattaccactaaatcgtaattgattatcacagaaagacttattatgtgtttgtgttgtgtaatcgattacgtcatagctataatcaattaaagtgttcatcaaggcttgagtaatagattaccatatactagtaatcgattaaagcagtgcgaaatagtttttccaaaacttaaccaatgaacacttggctttttatgcaatcatgaaaactttaaagctttttcacaaaacatgtgcttttatgaaaaccatgaatgcaagccagtgaatgatgtttatgcaatgcaatgaatcataggatgaaactcttagacatctaaagattacatatgccttcaatagaaaatcacccactaatgtgaattcactttcaaccatgcactaatggtaattaattaagaacggttgttctaaacaattaaaaaccatagcaagtgctctcgtgaaatttcaaaaccttgtctaagctaaacattgcattaacaaaaaagataaccataagaaaatgaaatccaaagacagtatatataccaaaagaaacagaaccttgtctaaggtaccaaacagaagaaactcttataaccagatcacgaaatctattgtctaagcttttaatatcaaaactttgactcatgtacctaaaaatatcttgacacataagtccataatagagagaaagcaatcacataagatttttctagtctagtcttttagtgtacataagtgattctactcacagacacattattttcactataaccaattaatgttacaatcactgactaacaatatacacaaattaggcattttatcaagcagttagtggccaagaacagcgaaatcacatagcggctttcatgaaaccgatacattaccttaaaatgataatgcaacatcagaaacaaacatttagttgcgaaataggttcattgggtgcaagaacgctactaacctgggatggagagacgaggcaaacacgtagaagtcgcgagcttcgagtgcgactaacaatgatgcaagaatgcaatgagtttcgacttcgagtgcgagattgacaaaatcgtgagagaaccacactggaagcagcaaaatcgcaagactgagagtgagagatgaggtttttgtgtaggcgcgggattgtgtgtttaatttgggggacaggacgcaccttttataataaaacaacaacatcgattttcattgaaaaaccgatgttaacatgttattgttaacatcaattttcctaaaaatcgatgtcaacaataacacgttaacatgggttttcttagaaaacttaaaaaccgatgttaataggaacatgttaacatcggtttttttcaaaaaagttaaaaaccgatgttaacaggaataggttaacatcggtttttctcaaaaaagttaaaaactgatgttaacagtaatacgttaacatcgatttttcttaaaaacttgaaaatcgatgttaaccatgtcctgttaattacaaaattgccaccgtattttcattaacatcgattttgtaaaacaaccgatgttaatgtaatgatgttaaatgtaatatttctagcagtgccactcttaatgacttaaacctctatttagttcattagttaagctctaactttcaagttgatcctagagtaattacttcgtttattaactctgttaattaaacttaactaaacataattaaagtgagtgagaaattaattctccgtttttcttattaattaaacaatttgtttatcacgtctagacacattagtgctctaaactttcattaattagtttgaatctttcatattaactttaaaagtctctatttacaaaattatcattaatgagagatttccttactttaactttctagtttgtagttgatttttattgaccgttgatttgaccaatgattttctaaatctaaatcactttttcctaagctctgtacttttctcgaaacaaacataagctacttttactatgaactttccaatctagaaaattggaatgttatcatccgagccaagaaactcattaaatatgattcaaaatagatcttattctattgttgattagagatttcttccatatgtaagggtcaatcaaaattcaaactctatattatactatttgattaagaggcacaagtcgctatcacttgtaccaaccgttgttgataattaatatctctcacttaagtcaatattgatagattctaaccacttattttcattccttctcatctcaccgagttgaatcaattgatttacaatttaattcttaataaagtccaattattgagtactacgcgagacaactctggattacccaatattaatttattctttcatggtaacaacccgcggtccccttctggacgtatatatctagttaatgtttagcatacatccctttaaattgataaaaatgaatgttagctacttaaagtggcctttaaatgaaatttgtggagcttgagctcgtaagaatttagtatttaatgtatttgtattaaaatagtgaagagaaaaaatataatacaattttaatttctctaatttataattttgatcttttttttctccacggtttcgatctcctatttgagaaatttttgtaaatttggttcagttctcattttttatatgttttaattcttttattttagttaaattgcatcataaatataacatattcacttaaaataaaataaaaattattttaatgaattttaaaaaaatacaaattgaggattgaatcaaaattatgaattttttaaatatgaagatcaaaattattataaaaaaacgagaaacaaaattgcaaataaaaaaactaaagaatactaaaactgaaatttaccccttgagttgactatttacgctatatactaaattttaatatcagaggggtaaaaatgtattatctcaccatgttaaaggattcctgacatttttttttgcttttatgcagttttgatttaattgtcctaattaagataggaatccccacttacatataaaaataaaaaattaaataaaagataggaattcccccctctccaatatttcgtctgatccgtttcaattagaatttgtttggtctctgttataacttcaatcactcaatcctccccaacctatatagtttttaaaatgagttaacataggaatcagggagttcggctaggtgataattaggagggtaggatgtaatgtagacattaggtgctactttattattgtttgaattgtacgtcattgttaatgagaaccacaaagagtgtgtgactcctataacattggcaaagatttggatctacattccctgccgtaacatttcacacattcatcctgctgcatgtcataatttaatggctgtaatttgtttttcttatattttatttttatttttttatcgataattgttagtttttattatatgagagattagaacttacaagttctctccctttttccttcaagcaccattcttacattttattaatttgtaaagatttaaaaataaaactaaatattaagattaaagtttccttgtctttctatttgattgcatatagaatccttatcccaacgaattttttccctttttatccagcgttccatatttgcatttgtatcatttcatgttccttattgttgtggtgtgaaatagctagctgaaatgtgattcaatattcaacacgattccaaaatgattatcaaactaagtatcaaaagaaaagatttgtctttcaactatggattctcaaactaaaccaaagaatatttgaatttgagatgatgaaaacggaaataataataaagcaataagaaaatttgaaatttaaacgaacaatgactaaaaagataaaatgtgcaaataatattaaaagataacaattctatttgattgattagtcaaactgtcttgaacatgtacattttgaacatgtacataaaagcaataagcaagtcctttacattgtatctttcaagactatttatactaaacatatcaaaataattgtcttgaacatgtacattttgtcactgactccgcgatctctaaaccggctaaaaatccttcattcggctagttttgaatgacttagctcgtaattgcttattttcccttccgtatattttaggcacgtttgttctcctataataatcatgctatcgttgactttatctcttgatcttttgctaatatccgctaatctcttttcaaaattaatttatattttattatcaaaatataaattattaagaaatttgaatattaagccgaaacaatagtaataaccctctttaagcattttttgggctaaaaatccaacagcttataacaaaaatttgaatgttaaaactttataaatgtatattggtacatattctcttgttaatttgtttatcgtattactaaccaaaattttaaatgccattattatagttaagtttaaatatcctttttattcctattataaaatacactaattttaatatctagttacattttaatttctatttatgattcctaaattagatgtctaaatgtttttcttatgtctttcccattagtcttgttaacaaaatacttacgtgactttactgttgccacatcacgttatcatgttacaaaaaatgttaacatgacaaattaaaaaaaaaaaaaaaagtatgtatacaatagcaagttgcccttggcaacaacgaggatcaaatctgttccaatctcaatcccactattaagatgactctattaggtttacttaaataacaatttcaaataaagctttgtaaataattttaattttctaactaacaaaaagaaagaaaaaaattaaacattacagaaatcataataacaaaaaaaaaaaaaaaaagcagggcaagaaagattgttgttatgaaataattcaccattatcgtaggaacttctagggaatagttcatttggtgttttttaggtatataggttgttattttggatgtataaactttaaaaaaaaaaaatacacaattgataagctaaagggaaaatgtgcacgatgaactcgatgtgggaatcaatttggcatttggggggcagggtatatggaatatttacattacccctataacgtaaaaaagccagttttatttctatatatatgcacatgttattagctatagggtctgttatctgtctcttataggattagtaaactaaagcagtgcatgttattttggtttttgggttttgggcatgttattttaaacatttaagcattaatagaaataaaggctaaatttatatactcaataagaaaatttgaagacttcatgtttcccttattaccttgtcttgtaaataacttgttagatattaaaataggtcaggccgtcaacaggaatttacaccttaactgatttaaaatttgacatgctatttttttaataactattacatcattttattaatttgatttagaatgtatttttattgatacaatcgttgaattatatctatatattatcaagatcgtctatgtcaaatttgttaaaattgaacaagaaggtaatcaaattatcaatgttttagtatattttgaaatgtttatattgcgtcgattttaatatatatgaacaaggtaataaataattttggattaatatgaatttttgtatatgtgatttatctaaaaggaacttaattttaagaaaatattattcaattaaaagttaattaatcttatatcacaaataaaataaatatttgagataaaaaataaaaataaattttatttccacaacttattaagattgcctcgtaactcgagtaatcattgttggcgtatttaaaatttggcttgttatcctgtttacatgtctaatatgaaaaaaaaaaaaaaaatctttagataagctaatagtcaagctagcttttgaaaatggcatgttatacctgaaaaaaaaattgatggactaataggacataccgaactttaattttttttctataataattcagacctatttatccaatgtaattgaatattataatttagaatgctaataattaaagtaagaggttaagagcacatttaaaaaaaaacacttatttaaatacactctctctaatttattaagatttaggttaattttaatcttcatagtttcataaatccataattttggtctctttgatttttattgtaacatttgattttctcttgtttccaaattgtgattttgatcccttcgataatttatctatgttgactgttatgtaattattgtttacaatctattaaatgatgtgacatgtttaagatgaatttactaaaacataaatatgattatttttaattaaattaagttaaaattaatttaatacaaataaataaaggaattattgataccctcccttttttccaagtctttttcttgttttcatcccctttcccttacctacatcgctccttcgcaccctctctttctctacctcttcttctcctttccttcacccactctctctcccaacttagtgcaagatccatatcaagcctcaaagtagtgtgacgcaaggaccccgcacttgaccaaatcatagagtcagggccgatcctgacattttatgagcctaaagaaaataataaataaaggggccttatatattaataatcagtgtattactctcccttttttctagtttctcccttttgtagttccttgctttccataccttttatcagaaagaaaatattaccgtttccacaaagctagaaattggtgtagactattcaataatttggtggaaattcaatgttcaattgcttgtaacaattaaatttgagtttggaatttgggaactgccgttggatgcgctatatcgagaagtggagaagaagctgaaagggtaagtggtgcatgaactatttttttttttaaaattgttaagccatattaaatttttttaaaaaaaaatattacagcaaaactaaaatttgggacctcaaaatttatgggcccagtacaagtgcacctttgaacatagtttagggacgggcctgcatagagtacaataatcaacaagcattataactaatgtgctaacatcctcaacgaaccaagccaagtcatccctctgcgctagctacctcgaaaaatgccacccacgcatgcgcatcaaggtcaaagtcgaaacctttctcaaccaaaacccctgctttttgacaactctgttcggaggagacctcgaatttgctccattgatggcaggttacaacaacacaagttttggctcaatggagacgacggagacctaactagagtgttggcggagttgcatggaagtttgaaggatcctagtacacgagctggggtgccgcacccatggtcaaactgtgacatgtgaaggaaaggtgctgcaagggaatggatcgattctaccataggttttagtgcgaatatgaagtgtgaaatgtttataatgcaaaggaaacttcgatgtgtgtctttttaccattataaattatttttaaaaattgtttacctaaaataagtgcatcaaaaaactacttaccaatatgggtgatttttttcatgttggatgtgggtgacgtttgtcaatgttgctccacccataaagtgccacccatatatatgtgtcaccttttaaagtggactatcacaacgggtggtgccactttggtccactccatcaagaaggcgaaagtggcttgtttcaagtgagaaacgagcctcaacaacttttaaaaaaaaaaatatttctagtatatataaaaaaaaggatatcacaatggtgtttagtagctaaattttctccccttaaatgcattaattttgaatgaaatgatgacgactccattagtattcatgtcagtctatccaatgttagcattcatgtaacgccctgattgtcgacttctcgacgactctcacactatgaaacttcgtgtgttggcacttcactcaacactcctcattgatcagaaccctccactagtcagaatcctaaaacatgagaaacatgaagaatatgaattcacaaggaaacttgaagaaaacctagggattttgtaacacaacacttaacaaaactacaacactaagaatcacaagaaaacatcaagaaacaaggaattactaaggattttcatttttgactctaatgcagaattatacctttaaagcatcccaaaactgaaattgaagaagaattccacaaggtttaagctctagataccaaatgatggactcctgaactgaatcaagtcctgtttgccccgatcttccttgcaatgaaatcaattcttcaattgaaagaaaaacagagtatgaaatgctctatttaaggacagctttttaggtttttgtgatttaagaattggaacaatggaagaagattagaagtggatttggattgacaccatggaataggaattccaataagtcttgaaagaattaccacaatagctcataagttattgataagaaacaagaagtttttcactaagaacaagggagaataactctcaacctctcacacacaaagtgcaatctaatttcattcaatcaaaagttcttacaatctattgtgatgtggtttatatagatcacaaaactacaagctaaatgaaatgtaaatgcatcctaaatgagattcaaatgtagcttccaagacaagcttttaaagacagcttttaaaaactaaaaatagcgcttctacagaaagaacgactttaatcgattatttcgtaatggtaatcgattattttgaatcaaataatcgattactagatcttggtaattgattatttgttcatatcaggcctggaagctgattcatgaacaaagtaatcgattatttcaccaaataatcgattatcacaggaactcccacttccttgtaatcgattacaagacggaataatcgattatcacaggaactcccacttccatgtaatcgattacaagacggaataatcgattacaacagagctatttacaaatctaacatttatacaaagtatttaatctattagaggctactcgtaatcgactacaacagataagctcaatattttgtagcctttttcatgattctccaagagatacaagctggattgtatatgatcttggagtgtttgagccctagcccttgtcattggccctttaatcaccaaaggaagtgcttccatgtgtaattccaagtcttccttcacttgccttggttttaggattgtatcatcccctccttcttgaaaagaacttgtcctcaagtttatttcttcatttggacctgcatcatacaaggaaagatcaccaacattaaaagtattactaacaccatattcattaggcaattcaagtttataagcattgttgttaatcttttctaaaatcttaaaaggcccatctcctctttgttgaagcttggatttcctttcatgaggaaatctatcttttctcaaatgaagccacaccaaatctccttccttgagtatcatttgctttttgtgcttattggcttgcttggcatatttttccattttcctctccacatttgctttcacttgttcatgcatcttcctaacataagaagctttagacaaagcatcacgactaatcatagaagatgtgttaggtaatggcaataaatcaagaggagttaaaggattaaagccataaacaacttcaaaaggagacatagaagtagtactattaactactctattataagcaaattctatgtgaggtaaacattcctcccaagatttcaaattgcttttgatgtagcatctaagaagttgacccaaggtcctatttatccgtttgtgggtgacaagttgatgaaaataaaagtttagtaccaagcttaccccacaatttatccaaaaataactaaggaacttggtgtctctatcactcataatacttcttggtaatccatgtagtctcactacctctttgaagaaaagattagccacttcacaagcatcatcacttttatggcaaggtatgaagtgtgtcatctttgagaacctatcaaccacaacaaaaatagagtcctttcctctcttgaatcttggaaaaccaaggacaaagtccatagagatatcaatccaaggagagttaggaataggcaaaggtgtatacaaaccatgaggcatgaatttagatttagctttatgacaaacgatgcattgagaaataaatctatgcacatcatgcttcattttttggccaaaagaaatgttcatgtaacatagccaaagttttatccgccccaaagtgacccattaaattattttcatgagcttcccttatgaaaagttctctcaaagaacttttaggaacacatagtttcttgtctttaaacaagaaaccatcctgtctaaagtatccttgatgagctccttttgcacacaaagcaaagatactagagaagtcattatcacttacatacaactcctttatgtgattaaagtcaagcaatttagtctcaagcatagaaatcaagcaatgccttcttgaaagggcatccgccactacattcaactttccttgcttatgtttaattacataaggaaatttttcaatgaactcaacccacttagcatgtctcttgttgagtttaccttggcttttcaaatatttaagagactcatgatcactatgtatcacaaattccttaggtaaaagataatgttgccaagtttgcaaaactctcacaagtgcatacagttctttatcataagtggaatagttcaaacatgcaccctttaatttctcactaaaataagcaatgggatgtttatcttgaattaaaaccccccaatacctatattagatgcatcacattctaattcaaaggaagcattaaaattaggcaatgcaagaataggtgcattagataacttatccatcaatgtttggaaagcaatctcatgctcttgctcccaagaaaagttcatggtctttttcattaaatctttcaaaggaaaggcaatagtactaaaatatttcacaaatctcctatagaaactagctaaaccatggaaacttctcacatctttcacattctttggagttggccactccatgatagctttcactttctcttgatccacttggactccttggccacttactacaaaacctagaaacacaacttgtgaagtgcaaaaagaacatttatcaattgttccatacaatgtttcctttcttagcacctctaaaacatccttgacatgcattaaatgatcatccaaattagcactataaacaagaatgtcatcaaaatatactaccacaacctatgaaatgtctaagaacatgattcataggtctcatgaaagtacttggtgcattagttaaaccaaaaggcataactaaccatttataaagtccaaattttgttttgaaagccgttttccattcatcctcttccctcatccttatttgatgatatccactcttaagatcaattttagagaaaatagtagcaccatgtaattcatctaaaagatcattaagtctagggataggatgtctataccttatagtgatgttattgattgccctacaatccgtacacatcctccaagtcccctcctttttaggcacaagaatgattggcatagcacaagggctcatgctctcacgaatccatcccttctcaagtaacttctccacttggctttgaatttcctttatttccattggtgaagtcttgtaggctggcctattaggaagtgaacaacccggaattgtaacaccccgtgtgcacccggtgcgttatcatcaacaatatcagtatcgcgctattagcgttatctaatcgcggtgcgaaagcgaaagaatcgtttttcttgatttcattatgcatagaatataaaacacaccatataatatcatacataagccccattgatccagttaaacagaaacatacaaacgcaggcagatataacatagaaaacaaacaagagatatcaggagggaaatataactcaaatacaataacattatcatctgtacacatacatgctccaaaaacaagatcacatctggtcatacatcacaaatatgtacagaacaacgggtgtacactcacaccctttacctctatacaaaactagacagagatcaaataaagattcttctaatcttcaactgcagcccatgaccactccagcgcactctactagggcctcctgccctgtggtagctcctctcctcaactggcacctgaaaaccacaaaccccacacagggtgagacaaacgtctcagtaagctcagggttctgggaatcttccctcaccctggttcacctccaagcacaaacacataaacagatatcagagctaaggatatcatcctagctcacacatacaaagtctaggacatcgtcctagctttcacccatcccagccatctgggcacaaacactggatgccatcagcatcagaggtctcccacctcatactggctctcaagccatctcaaaactcgtctcacagaggtacactaccatagtgtccaccccaggacacatcttatatcagagaggcaccgcctcatcactgaaccagcattgcctgagtcacctactcaggactttacacacacattgcctgaggattctctcaactcaggacttcaagcaccagatatggctcatctaagaggccttaggctatcatcccctcgggaagccctctctagagatacaacatatctgtctactgcctggcctctccaggacttctatgacacatgcctgggcaagaacatccataaatgggcaatcacctccaggactttccacaacacatgcctgagagatatcatctcacacaggaggcactcaatctctcaggactttccagtccaatgcctgagagggatcatctcacaccggaggcactcaacccctcagggcttcacatctcatgcctgagagagatcatctcacacaggaggcactcaatccctcaggacttttccgctgcctgggagagatcatctcacaacggaggcactcaatcccccaggacttccatcagctgcctgagagagatcatctcacactggaggcactcgatctctcaggacttccaagtcacatgcccgagagagatcatctcacaacggaggcatcaatccctctggacttccaaacacggtctgagagagatcatctcacaacggaggcactcaatccctcagactgtcaatccactacctgagaaagatcatctcacaacggaggcactcaatctctcaggactccacagcaatggcctgggaaaccatccaggacttaatcgcatacctgagataaccactcaggattctcaatatctctgcctaaggaagaacctccatatagggcaatccacccttaggactttaatggagagcagtggcacctcccaaggaatctcagctattccaaggagtcctcaaactcttcctctggctagggaacctcagctagcccgataccagtccggtatcctataggttccatcacagaccacctcatggtctgcatctcgtcagaatcaataaacacctcacactgtctcggtgtctgacctagggttcatcatataatcatatttctagaatggcctgagctccactccaaggaccgttatcagcccttcaggcttccacacacacacacacacacacatatatatatatatatatatatatatatatcaaacatatcatgcattcatcacccccacttgggtggcagaccagagaaagggaaaaactctataacgatgagcttacctgctagttgtgcctgcaactccggcctcagggacaatggtcggctcctctgacacctcgtgtcaagccctaccaaagcatacaatatcatattacagaccattcaggcacataacaatcattagctcatcagacagtcctcaactgtctctgtgaaaggaacctcagtcctttctatcaacccaggtcatctacctaaggttcatcaggctcatccatcacaagcctttccatagacctccagtggtctatctcagagcaaacatggcctcagagtcgttccagactcatacacaagccattcacagagagctcgaagctctaacaaccccagatcctctgggtttctcaggacttggacggtctatctcaccagacaccgtccccatggcctatcaggcacctcaagtccattatattggctcttgcatgtctcaaatcaagtgactcagtccaagtcacacatgcacagcctagagccaaaaccaacattcaccaaatcacaaactgaaagctaatccttcctcctctcatcattctaaacacatctctcaactggacccagagccaattctagccctatcacagatgggtcactattcacccaaaacccccaattcacaaatcaatcggagaaactcgagtttcttacctcagaactgatgaggaaggcctctaggctatgcttcctagccctggtgccgctgaatcaccgccgttcctcgtccaaactcgagctctgccacctccttctgagaaaaggcttctctggggtttcaagggaaagagaggaaggattctagcttataaccagttccaaggaggtttactaggcttagggagtgatttaggtgaagaattaagggtttaagaagcttgggagcagctctaatggaggctggagtcgtggggaagaagagggaatagtgttttccttcaaaaacgcgttttccccctttatacttagtctgtccgaggtctggcccgatccgcgcccgatctcgcgctagtcgcgccagatgcaccgccactgccgcgcgacccgcaccacatccacgctatccgcgtgaattggccgaacatgtggcgcgatccgcgccacaccccgcgatccgcgccaacccctcggccctgccacgctactcgcgccatagttcacgctatcagcgtgaataccccgagagaaaagggtttccaggcacttctggcgcgacccgcgcgactctcggtgctatccgcgccacactcataatacagcttcccatactggagcctgacgctaatcgcgcaacatcccgcgccacccgcgccagaccttagggtcatcacaggaatcaaatctatttgatgctttatacctcttaaaggaggtaagccatttggaatttcctttggaaaaatatcttgatactcttccaaaagatattgcatagctttgtgcaacctttcaccttgcttttcaacatgtaaacaaagagagttaggaagcatataacaaagaggttgttgagccaataacactctcttcacttgcttttcactcaaaaagaagctctcttttatctcatgaatttttttgttattattttctttttcatttcctttttctcactagatttccctttttgtacaacactcttttttttattttcaagtgcagtaatttttttcaactcttttattctcttttctttcatcttaatttgatcctcacacacttgtctaggagtcaatggtctcaaaataattttcttgcctttatgctcaaactcaaaagtattttccttgccatcatgtacaactttcctatcatattgccatggtctaccaagaaggatatgaccagcctccgtaggaacaatatcacaaagaacattatcatgataaccattaatagagaaaggaatgagcacttgagaatttaccaacacttctccactttcactaagccattgtagcttgtatggctttggatgttttgtggttggcaagtataatttctccacaattcttgtgctagctacattagtacaactcccaccattaatgatgagtgaacatactttgtctcgcaccaagtatcttgtgtgaaaaatattttctctttgattctcctctttatctaggcaaaaattactcaacattcttctaaccatcaaaagatctcgctcttcggcccacaagtgtaagtgtcttttctttctcacttgaagaactagatgcataacttgaagattcacttgtaaccttcccatcctctagcaaaatcatagttcttttattaggacattgagaagcaatatgtcctcttcctagacacttgaagcatttgatgcttcccatttttgttggagttaattgttcaatttttttacttggtttttttaccttctcttctcttcttctaagttaagaactctccctttttggctcatctctccaactagaagttgcaaccccactagacttggaatagggaattttcctccttttcatttgttgttccaccctttgagctttatgcactaggtcctcaattgtgtcataagagtatagctccaccacatcttgaatttctctattcaaacctgaataaaccgagccatagttacttctttatgttccacaattcgagctctcatcatcatcaactccatttccttgtaatactcatcaacactcttggaactttggaaatgtctttgaagaagattgtgaacatctcttgaataataagctggaacaaatctccctctcaaacttgctttcaaatcttcccaagaatttactctttgccttcttcccccaactatatctctttgaatgtggctccaccactccaaagcatatccaccaaattctgtagttgcaagagtaactttcttgtcttcctcaaaatgttgagatgagaaaatttgttcaaccttcatttcccactcaaagtattcattaggatcattagtgccaaggtattttggaatttttattttgatttcacccaatcctccattcctctcatctctctcttctctcctcatcctcctatcctcatcttctctatgttctctcctcatcctcctatcttcctcttctctcgtcactcttctaggataatgtctcctatgattttctcttccatcatgttgtctcctttcctcccgctcactcctcccatcatagtaatttcctccataagaagaagcataatcactcccccttctactaccataaaccaatccatccacaccactcatggaactactctttcttgttttctccttttgcaactcttcaaattttgcatccattctagtttgcaatttctccatttgcttagtcatggctctcatcaacctataagttttaagtgacaaagcatctcctccacttgaactcatccttcaaagaaattgttagcaaaaaacaagtatatataagaaattcctcaccactctctaagtgtttactctcactctggtgtttgcacactttcgaggctttttctataatattctctcttgcctttttccactcttattctctctttagttcgtaggcaaaaacttctaatcaaatcaagcctctttgctatagtgaaatatgaaatgattctagacaaggcttaagagtccaaagaataggaaacttttaagacaaacttttggaaatttaaagagacaagcaacaaagcacaatttagaaaggactaatttatgagacaactcaaggactgctacagctgtatcaaacttcaaaataaagatatgccaatgaatttaattgctaaagacattttcatcaattctgaatgccatacactttcacttgaatttgatgttcaaagcaattttgtaaacttataatttgtagcctgcttctaattttctgttttccagctactcttcactatttctttgctttctaataacacttgatgcaattttctttttggtttttgtttttctttttgtttctaacacttgttccagatcaagcatgaaattgaaatcaaacaaagtattacacaacacaacaacaatactaacacaaattgacaagaatcaaagctataaattagggaaactatgaagaaaccctaaaaaacatgagaaacatgaggaacatgaattcacaaggaaacttgaagaaaacctagggattttgtaacacaacacttaacaaaactacagcactaagaatcacaagaaaacatcaagaaacaaggaattactaaggattttcgtttttgactctaatgcagaattttacctttaaagcatcctaaaactgaaattgaagaagaattccacaaggtttaaggtctagataccaaatgatggactcctgaactgaatcaagtcctgtttgccctgatcttccttgcaatggaatcaattcttcaattgaaagaaaaacagagtatgaaatgctctgtttaaggacagctttttaggtttttgtgatttaaaaattggaacaatggaagaagattagaagtggatttggattgacaccatggaatatgaattccaataagtcttgcaagaatcaccacaatagttcagaagctattgataagaaacaagaagttcttcattaagaacaagggagaataactctcaacctctcacacacaaaatgcaatctaatttcattcaatcaaaagttcttacaatcggttgtgatgtggtttatatagaccacgaaactacaagctaaatgaaatgtaaatgcatcctaaatgagatccaaatgtagcttccaagacaagcttctaaaaacagcttttaaaaactaaaaatagcgtttctgcagaaagaacgactttaatcgattatttcgtaatggtaatcgattattttgaatcaaataatcgattactagatcttggtaatcgattatttgttcatatcaggcctggaagctaattcatgaacaaagtaatcaattatttcaccaaataatcgattatcacaggaactcccacttccatgtaatcgattacaagacggaataatcgattacaatagagctatttacaaatctaacatttatacaaagtatttaatcgattacaggctactcgtaatcaattacaacagataagctcaatattttgtagccttcttcatgattctccaagagatacaagctggattgtatatcatcttggagtgttggagtcctagcctttgtcattggccctttaatcaccaaaggaagtgcttccatgtgtaattccaagtcttccttcacttgccttggttttaggattgtatcactcctcgttgattagaaccctccactagtcaaaatcctctgtaggtagccttttctgagacctcaacaatctgatttagctgctttcagaatcaatgattgtccccataaaccaacacaagacttttgaactactttgtccttactcacatgtttcccgagaaaatttccagaaggtcacccatccataactactacaagccaaacatgtttaactgtagagttcttaagtgataggctactaaaaagtagatgcatcttgttggtatatgtagtaccaattaattccgttaagtcattctcaattgtacagtcctatacttgtatagcctctggatccctctctttcaagtgtgatttgtcagggagttacaatttatgcggcgtaatcgcactataaataagtgaaaaacgagcctaaaaacgttaaaaataaaaaataaaaaaaaatctgatttctggtataaaaaaaaagatatcacgaagacgttttgtagttgaattttctccccttaaatgcagtaattttgcatgaaatgatggcggctcaattagtattcacgtcggtctatccaatggtagcattcacactgtgcaaatcacactaaaaacgaacttccactggaaacaagccacagggtcgcgcctccttgatggagtggaatagattggtgtcacctgttctgacagtccacctaaaaagatggcacagattagggtggcacctgtaggtggagcaactttgactggtgccacccacattcaacgcggtaacaatctcctatattggtaaataattttttgaccacttatttaagtaaataatttttaaggaaaacctataatggtaaaaagaatagccctatgatgtgtgtgtgtgtgtgtgtgtataagtgtctatagaaggagccaaggtggagggttgggttcatgtcaaccaacctactcttatagcccctgaagcataaaacaacatgtggatagtgcttttgtctaaaagttactgccttcattcctttttttttgtgttatttaaggttgttaggtaaaattaagaaaaataataattttttttgttaataaaatagttgtggaattttctttttgaccgttttttcactccataataaatacatgtgtaaaataattaaatattagaaagcaagggtatacttgttaaaagagtgattaagaactgacacataagtgtgtcatctcacaaattaattggtcaatgttaacaacctaatggtcaacctatagccaaattaattgagggaccaaaattgttaagtttgaaaactaagggatcaaatgttataactaaaaatcaagagactaaaatcgtgaatttctgaaagtaggagactaaaattataatttagctcaaaacttattaaaaactataaaattaaaatagagaatcattaaatatgtgagacccacaaaattttcattttcaaacaaattcaaccaataaaagagattgtattctaaaaggtgtccctagcatttcatgtaggggatatttggtaggagataaaatttttcatatccagaaagatgatccctgggaatcatgacttttgaaaatgattaaatatgtttggctagtcataatatatttcctggaaattaaagattctcattttgttattagaatttttctaggtatgtaagtatttttacaaatataccctttattaaaatactttcattaaaaaaaaaaatttactaaattttatagttaaaagaaaaactaacccaagatacgaaactatttgatggactaacctacccttatgtaagccctaacttctggcgcggacggcgtgggatgccgcgcggatagcgccagaagtcctgatgagaaaaccctgttgagggtgtggcgcggttagcgccaggctcactagaagttggtgttggtagcgccagggtctcgggaagttcacgctgggagcgccaatagtggcgccaggggcgccagagtttttgcagcccgcgcggatcgctccactggttcggccagttgacgccgatagcgtggatgtggcgcgattagcgctgcgatggcggtgcatctggcgcggttagcgcgagatcgggcacggatcgcaccagacctcggacaggctgagtataaaaggggaaaacgcgtttttgaagggaaaaactattccctcttcttccccacgaccccaacctccattaaagctgctcccaagcttcctaggaccttaaatcttggccttaacactttcttatggccttgaatcttgagagaaacctttgtaaagcttaaatcctttatcctttttcttagaaaccccttttctgagcaaattcctttccctcagagaaacctcagaaaacggctgattagcgaagacccaaggcttggaaaggactccagagctcgaggaagctatcctgcagccttcttgatcgccactgaggtaagaaacatgaggttctgcagttgttttgggattgggggtttcctatgaatagtgacccacttgtgatagagctggaattagctctgggtccagttgagagatgtgtttagaatggtaaaaggatgaaggattaactttcaatttgaaatttggtgactgttggttttggctctaggtggtgcatgtgtgacttggattgagtcacttgatttgagacatgcaagagccaagttgatgggcttgtggtgcccgtgaggccatgggaacggtgtttgtgagttagaccgttcaagccctagaaaaccctgagtatttgggtgatgagagctgagatgctcattgtctgtggcttgggctgagtctgtgggactcagaggccatggtgatttgagatggaccactgagggtctgtgaaaaggcttgtagagaacgagcctgatgaaccttaggttgatgacctgggttgatagaaaggactgaggttcctttcacagaggcagttgaggactgtctgatgagctaatgactgtttatatgcctgaatggtctgtgacatgtggttgtgtgccttgatagggcttgacacgaggtgtcagaggaacataccatcgttctagaggccggagttgtaggcacagttgccaggtaagctcatcattctggggtgaattcctttctcttgtttgccacccaagtgggtgattgatgcatgccatgatagattatagatatgtcacatgcatgctgtagaaagaaaggccaatatggcctgatattgatatttatatgtgattgaagcctgagaggctagatgaacggtacttggagtgatactcagaccattctagatgtatggatgtatgatgaaccctaggatagacaccgagatggtgtgagggtgtgtgacacctgtggcttcaggtgtagggtcatgggcctttggattgatgaacactgtgagagtgttctatgatgaggcaaagaccctgagatggtcagtgatggaacctataggataccggactggtatcgggctagctgaggttccctagccagaggaagagtttgaggactccctggaatagctgagataccttgggaggtgccactgctctccgcctaaagtcctaaggatggattgccctatctggatgttcctccttaggcagagatgatggaagtcctgagtggttatcctcaggcagcagactggaagtcccgagggattgagtgcctccgttatgagatgatctctctcgggcatgtgacttggaagtcctgagggatgagtgcctccagtgtgagatgatctctctcaggcagctgatgggaagtcctgggggattgagtgcctcctgtgtgagatgatctctcccaggcaatgggaattcctaaaagattgagtgcctccgatgtgagatgatctctctcaggcatgtgatgtgaagccctgaggggttgagtgcctccagtgtgagatgatccctctcaggcattggactggaaagtcctgagagattgagtgcttcctgtgtgagatgatctctctcaggcatgtgttgtgaaagtcctggaggtgattgccctatatggatgttcttgcccaggcatgtgatatggaagtcctggtgaggccaggctgcagacagatatgttgtatctctaagagagggcttcccgaggggatgagagcctaaggcctcttagatgagccatatctggattattgaagtcctaagctgagagattactcaggcaatgtgtgtgtgtgaagtcctgaataggagactcaggcattgctgggttagtgatgaggcggtgcctctccgatatgagaagtgtcctgggagtggacactaagttagtgtacctctgggagacgagtctgagatggcttgagagccagtatgggtgggagacctctgatgctgatagcatccagatagtaccaagacagctgagaatgtgttgatagccaggatgatgtcctaggcttaattatgatttgtttatctgtctgtgcttgggggtgaaccagggtaagggaggatctcccaagaccctgagcttactgagatgtatatctcacccatgttgtgggttgtggttttcaggtgcttctggagaataggagcgaccacagggcaggaggcctagctgagagtgctggagcggtcatgggctgcagatgaagattagaagtctttttcttttgatctctgtctagttttctgtataggaatagggtgtgagtgtacacccgttgttctgtacatatttatgatgtatgaccagctgtggtcttgtttttgagcatgtatatgtacagatgataatgttattatatttgagttatgtttcctcctgatatctcttgttagatttctatgtttgtatctgcctatgtttgtatgtttctgtgaactggatcattaggggcttatgttatgttttatatggtgtgttttatattccatgcataatgaaatcaacaaaaatgattatatcgcttccgcaccgcgtttctagataacgctgatagcgcgctatgatattattaatgataacacgtccggggtgttacaccttataacccctcgggcataaaacaacacgtaacaagtataaaacaacaagtcaataatgtctttctctaaaaattactaccttcattcttttttaatatgttatttaagattgttatgtaaaaatcaagagggacaataaattgtgttgattttaataaaatagtcggggatttttttatccctttttcattctacaataaatacatgtgtaagataattaaatattagaaaacaagtaaaaatacaattgttaaaagagtgaattatgggatcttgaactttgtagaaacaaaatatttcaaaacctgacacatatataaaaagaaacgaagagagtacaattcaagcaccaatacctattcctagtgatacccttctttattaataaattattgatttgagtgataatgaacttaatcaccttaagtaagatatcaaatttgaatcttgtgaatgaaaaaaaaaaagtatgattaagagagaaaaaactcaactaaaagtgatgaatactctatactaataacataattaaaaaaaagtaacatgctatttaaagctttaaacgccccccggacgtgttgaggaaattaatgcattaagttggatttaatcgccattgtgagaatgcataaccaaatgaaaggaaatagtggtctcgtgccatcatgcatatatatgatgatatgaaggactcctcctgtcctttatttaaaagtgtaacattgatgcgctgacaacacatatccttgcaggtttcgattgaaattgatacatattaccgactaaccacataagggatgcatcaataactggtggcatagaattgacatatcctcgatataactattgacgacgaaccgcatataaacaaatcataataactattaacgactggcatataaagtataaactaatcgttatcgtggagccaaactttaagaacattgtaaccttaaaatgtattataagatggtttgaaattgttgcaggtcttagggtgaactttcataaaaagttcacttggagctgttaatgtgcaaagacactctttgaccagattttcaaaggtgcgcgctgaattgcgggattctcaccatcccgttcacttatcttagtgtcccggtgggcattaatgctcgcaaagaggacgcttggaggataataatccagaaaatgcaaaggaagctaactcccctggaagacaagtaataatagaatctctcaatggtggaaaggcattatttccttcattggtgagcaatctaggtcctcttggttcatagataatttgggttgtaaagtagggagaggtgatcaatttaggttctagttggatgattggacaagaaacggttgtttatctaggcggtatccatgattttattttcccttgcagttaataaaaagtggttagtaatgcagctggcagaatgacaacaatcgaattgggtttggaaaattgattggaggagatctgttttgcctcgtgaggaggaaactgtagaacaattatttactgacattaatgttggagtaaggggtttttgagagagaaaaggatttagtgttgagtgtttgaagtattatatcaagagacatcagatgtgcaatgcttgaagtgttatttccagcttaggaaaaatcttaaaaatataacacgttattcacttccaatccatatgggcccatatatacaataatttattgggcttgtatgtaaacatattaatatttaatatatatatatatatatatattaaatatatttaacaattaatcaaattcctcttaaacaatttgaagaagacacatggttgtggaagagaaataatgagggactattcactgataaagatgtttgttccttattgcataatgcatgcatcttctagggtagtggataacttattttcattattgtagaaactgaaagctccctctaaagctatttttttacatggagattggctcttaatagaacccagatatatgaccagttattgaagagaaacatcatcactcataatattgactctacatgcttgttgtatggactgatgctggaaagtgcaaatcaccttatttttagctgtgacttctcttatcatatttggcaactatgctatagttgcttggatttcaatcagttctgcctacaagttgttgtggcaatttttggagtcattatgacttggttaaaggtgtaaagtctcgaggtgaggtgtacttatgctcatttgggttgcagcaatttggtccatttggaatcaccgaaatgctgtcattttacggaaccagcagccttgtgcagagtatgtcattgaagaaattaagtctaaatcgtagggatggattaaagctaaatacaaatactttcgatctttctattatgaatggcattgtcaaccttattgttgggaaaaagataccaacttcccctttcaggacctgttatgaatggtcttgtacaagcaaaatactctatacacaaacaataattatgcaagcaacacaacataatttttaacatggaaaaccttctcaatgtgagaaataaaaaccacgggaccgatcttggagtccacccaaattcttcactatcaataaagtgagattacaaaatggtttcaacaaccattacaatcaacaaacaactttaacaaaagttgtaccaaaccatcacaagaggcaaacatataaaataggcttttgtaccaaattaatttataccatcataaaaaacaacaaataaatcccaatggtcaaactgacatattgcaagagaagaacacacggatcaaatttgaggataatccaacaattgagcaaagagataactctttctcaatatcaatgtccgaaacaagatagaatagagcaggaattctgataacctctatttgcagttgaaacaatccctcttggaacagttcaatgaatgatccgaatggtaataatgtagaaacggattttagtagggctcctcaaattttgaatacgtccaacggttaatgtgagagaaatgtccctcacaataacgctgcacgcttcagaaaatggtttcataaccgattcggtttaggaatttccggttatactacaagactctattcatgaaaccaaccgttagatgttaatattggtgagtcaagaaccttattacaaagttttaccaagatccaacggttaacagaagggatatagaagattaaaggatgatagtttctaccattctccacatgcgaattttaacggtttctttctcctctcctttttctctctcttgtggtttcaaattaaccggcaacatatgaaaagaagtaactgctggcttattaaaataagaaatttcaatcttttcttatttggctggacttggcttaggttcaagcccaatacttatgccttctgcaagttgcatcactttcaactagtagtgtaggattggaatatattgtactgtagttgttaattatgccttatggtaattgttctatttgcactggtggtactatagcttgtaaactttgctggtgtatagttgtattctgctgttagatcacttcatatgaactctaacatgttgataaaatttaatttgttggctgcttaaaaagaactaatcatcatcgaattggggtattatttaaattaaaattcagaccatgagtaaaattcaaaattgaaacataattaaaattactcaaagatttctcataacgcaaccaataactattaaaaaaagaaaagaaaagaacataaacaagacatgaaaaaatgcagaaaaataaataaatacaaatggagtcttgacgagaaagagaaaaattacatagatgagtgtgcaacgttgacaacggagaatggacttttaaataaaatatccctaatcgaagataatttatattcgaaaaagggataatataatccttttttttatattattaaagctttacccctaggtcagaaagtaattagattcccgacctatcatttccgaaaaacaaaaaatttatcatgtaccaaattctcccaaagtaaatattagaagaagaatgctaataagactctctatctagtatttcgttttgaatactctttataattagctggtttttttatatttaaaataatcaattttgatgggtcacattccttatgatatggctctttcccctaattaatttagaaattttcatccaccaaacttagttatttcctttaaatttcagttaatgataaagaaagttaaaaggagagtattaaaaagaatataaaatttgcatttctcatattataatcagatattccgtatgatccaatgtcctcttcctatttttattttctctcctctttttctattccaatattctgaaggatgtaaaagacctggtataatggtataggaaatgaatggtggactaatacataaacctaaattgatggaattaaatcgtcatatattttcaaactacagtattttctaaattaataattaacaggcagcatgggtggaactacgtgttcataggataaataggcatttttgttcctggatatatagagacctgacaaattcgtccccgaaagatgaaaatttaaattttagtcctcgaaagtgcaaaaagtgcaacaaatctattcatccgttaacttctgtcgttactgttaatgaaaaaaccaatatggcacagagggacgaaaatgtcacaaaaataatagtcaacatggcttcagaatagattggattcaaatgtcagtaaattttcgtttaacaaaatgttagtaagtttttattggacaaatttatcagatcccaaattttgtttcatttaagggtaaaatacaatttagggtaaatagtcattttcgtccctaaatatgtagagcactaacaaatttgttctgaaagatggaaattcaaattttagtatatccatttactttatttgatacaactatttgtttgtcttctcagatcattgacacataggatattttgtctaatggaaacttactaacattttggtccaatgaaaacttactaacattttagtccaatctattcaggagtcatattggtaatcatttttgtgacattttcgtccctttgtgctatgtaaactctttcattaacgataatggatgaatgaatttgttgcacttttttcactttcggagactaaaatttgaattttcatctttcgaggacaaatttgttagtgctctacaccttaagatatgaaaatgactatttacactaacacaatattatcaaatgtctgaaagtagtaaaattgattcatttaataccattaacataatattctaaaatagactaatataaattaaagaaaaatatttttaacgagatttactataatagtctgaatcacaactatttcctacaaactaatatcttgcaataaactttggtgaaatcaaatttgttacaaccaaatttgctgaaacaaatgaacaaaatatgattagttaatattataaacatttgtcgtccaacacttggagtccaatattaacattatttaaagcaaatcaaacaactctaaaatttttgatcggttttgatctattcagttcggttttgatcggatctatatatctaaactcgtgatctaactcatacataaacgattttgatcagttcgatttaattttgaccaaaatatataaatgatccaattcaaaccgtctaaattaatttgagtcaattcgaacttacaaatgacatgtacccgtgaacagcattatttacaggcgcagccaccccctatgaatctgaaaattgcttactagcaggattggaaaaagtttcgccccctcttccttatttatttattcttacataactcctaagtcttaataattagttatatatctcagttaaaaaaaagtgtttgtctgtctatatattaagaagagaaactcttatttattcatcatttagcaattatattacgtatactttgtctattagatatttggctaataaatattatacaatagaataatattatattatttagcttttaaatttctattcttaaatattgttattcttatatttaaattattgtctttagacttttataatttttattttattttaatttgttagattatttttcaacactatttttatgtttgaaaaaaaaaatctaaagttaaacttagctcagctttatgttctaaaactacttttaaattctttaaagttgattacatatgaaatttcttttcattgggtatatggtcttttattttttattagtctaaattttaaatggttaatagtagaaatctgttttggtttcaagttgaaaaaattattttgcgtctagaattgattttagatcaatttttatatatttgattttatgttgtaaaagattttaaaattaattttagatccaaaactgattctaaattgaaataactatcactagcttttatattgaatcataagattttattaaattttacttctgacttattgatacaataatgaaatcattcatatttaaatcatgttacttcaaaatcaattttaaccaaaattaatttcgtaaaatcaattttaattaaaattaattttataaaatcaaatttatcaatgttgatctaaacaagtgctaagtaatttgttgttgttattttagttactatgtgatggattttcgtccgctaatttattctggttccgctgtgttaacagggttggcctatgtatatatggcggttcaagttcctgttttagacttttagaaagaaaaaaaatatcattagtatttatataagttctgttattagatgatttagtatagtgataatttacatgtattttttttcttggtgaataaggttcaaacctagctgaaagaaaaaagtatttatatattttatagtgctcctaatttttgcttacttttattagttttaaaaagatttctcctcaaaattcaaatgtagtctcatagttataacacctaataattaacgttgcccaattaatctctaaaaagatttgatagttttttttccagcaaaatactaatatcattaagtaaacgggtgcaagagtaacccaacccatgtactcaaaaggattggatagtgttaattgaatagagctaaaattatcttagtttaagagtgcacaatttgatgcataaataatctattcgcctcacaaaatcacacaacatgcatctcaaccttcttcgtaataaaaatctgtcgcgtctcttgtaataaattaagtagaactgtgagaagctaaattggggatcacgaaatacatgttacggaactcctttttatcttcttcccaaagccatatattcaaccaaactctttgtatttacttgaatttaatcaattctcgttcccctctcttttttttctacccatccgtcccttgcccacataaaagcaactaaaattcgttgaaccacgggtagtttaattgaatttaagttcacaataaatctggttgataattggtgttcaatcactattcaagcaagccacttaagaaaccattcactatatatataaaggctacaagccactttgtttctcaacctcacttgatcgattctccaaatacctaatatggagtttcacattcttgccatcattacttttctcattgtgagcccctactcttcacacgcattcatttttctttaaatagtagtggttcaatttatctatagataaactatttatttaatctctatagttatgtctattttaaattttagttcctatacacacaataaaattgtaagttttaatccctacgcaatttttgtagcaatttatcactactagaaagtttttgtagctattttatatcattaaaatgttttatccagtgttaacaatagggatcaaatcttaacttttatacgtgtaagatttataattttctcatgtaagagctacaccatttcccttataaaagttaaaaactaaaactaaaataagcacatctatagggaccaaataagtagtttgtccattatttattttctttgtatacttctaagtctctatttgcatgtgaaaatgattgtgtgatatggcaacaaaaaaaatgatcgtgataagagaaactgaagaggttgtgttacgaaatgcagcttgtcgtggcaactaatgctgatgctgcattacctcctgcattttactggaagtccaagcttcctaccacaccaatgccgaaagccatcactgatttgctacaccctggtcagattattggcacttcttgtaggctttacatatgcatagaatattactttcgattgcttaatttgaagttctactctatcaataatttagcacaaaagatcattaaataattaagaacatttcacaagtattttagttcattcacttttttttagtttatgcacctcaatatctctgttttatatgtacagacactagacagggtatgttgtgaatacgacaggaacacgtacctagtaggagggctacaggctagtcctgttgtgttaagataaaagagaaatattaatctagtcctgttgtgttaagataaaagagaaatattagccatacaccttttttaatacaccatttagagaaatactaataacactacattatcactgagttgcactttcttttatgatcagatgaaatccatgtgaattttatgaaatatgtgggtctcattttcggtggatcacattctcaaactaaaaagacccacattaattttattactcggaagaagtgtgttccaaagagctgtcaaaaaaaaaaaaaatttgtgatccaaagagatagtccgttgtacgtaattacgatacagtaaagcataaagcgtcaaatattaaaataaaacaagcaatagggctatggcctgatggtttattttttttaaaaaaaaatctcttcttatatttcacaaatgttcatattaaacagacaatagaatgtattaataatgaaaacggtgtccaactaactatatatctaatagttaagtgtatataacggaggtgttcaaatatcattactcatttcgatgattactcttttttaagtgaaacctgaaaaactatgcagattggaaggaagagaaagacacctctgtggatgtagggaaaggtggagtaaatgttggtgtagaaaagggaaaccaaggaccaggaggtggcactgatgttaatgtgggtggtggagacggtggagtgaatgtgaacacaggaccaaagggtaagccagtgcacgttggagtgggcccacattctccatttgattacatttacgcagccagcgagacccagttgcacgatgaccccaacgtggcactcttcttcttggaaaaggacttgcaccacggaacaaaattgaaccttcacttcactcgctactatacctcaaatgttgatgccacgttcttgcctcgatcagtttctgattccatacccttttcttcaaacaaggtgatgatgaagaaaaaagtaatagaacaatgtacatagataccagattatagcatgttagtatagcaatagtgttatcgaacactaacctatattcgcactcatctccatcagtggtttggtgggaaaaactgttaattcctcattggtagggacctctcaatggactatctactaatgatggactcaatcatcactaatgatggactcaatccatcacatgatcaattttatcataattccacccaaatatccgtaatctagttaaatagttattatatttttaactgtcaattgatgattaaaaaagataattgattgatattgattcacacaatttttgaacaggtgaatgatgtattaaacaagttttcaatcaaggaagggtcagatgaggctaaaactgtgaagaacactattaatgagtgtgaagggcctagcattaagggagaggaaaagcgttgcgtgacttcacttgagtccatggttgatttcgccactaccaagcttgggagcaacaatgttgatagtgtttccacagaagtgacaaaagaagatagtgagttacaacagtatacaatggcaccaggggttaagaggttgggtgaggacaagctagtgttgtgtgtcacaaggagaattacccttatgcagtgttttattgccacaaatcagaaaccacaaaagcctattctgtcccattggagggtgctgatggaagcagggtcaaagcagttgcagtgtgccacactgacacatcaaagtggaatcccaagcatttggcgtttcaagtgcttaaggttcagccaggaactgttcctgtctgccacttcctccctcaggatcatgttgtctttgttcccaagtagaaacacacacgagtcccatttgtgatgttggtgaataatttggcagttttaatagcatgaaatgagctataaaactaaatcgtagtattgcattatgttatcctacgttgtcagcatgtttgcttttacaggtttacgcctgttatctcaatatatgtactagtgatgtattacatgtgctaacatgtgatatatatgaagctttttcattcacatgaaattctgtgtccatggttttcgggggtggatgttgttatttgcacatcaatgtttatttcaccaaatttacctatttttatgagaaatagacaaagcatgtgatggaatgtgcatttgttttggtattctatcatctagaaaggaagtgaaatttgatatgggaattcaataaatcactaaacaaatgaaaaaggattcgctttacaatagctttgaatgatacaatggggagagaagatcatgttcatttttctttccaactcaaccctacaaccagatacttgagtatatacagatccctaaaaaaaattgtattcttatcataaaaaagggtttaatgaaaaatagcagtgctatcagtggctaggcactgaaactcattttattttgaatgacatggacacatcaatattacaaacactcatttgacaccctacctggatcgttttcttctcatgtcacattacttgtgacatctatcacttcgctatcttctatttctttttcagcatatgggtgtacacaaaacattacccttttgtctattactcagcgaggactccagatactatacaccgtaagcctcttcatcataattcttcccgggcattcggataattccccaccataccaaacctcgaatcaattatggagaatgcatcctccaaatactttatccttgggtcacaaaaagaacctttgtgcttcaggattcagccacaaagtggcatcattgaatttattggatgtatatggctccaaagatccccatgttcttccaaccttaagtttgacatgcaaaggaactgcagaagcataaatgtaaatattgaatttttttcaccatacaagcaaaacttcaattcattttaccaacctccattttcaacccccccccccccccccaaaaaaaaaaataaaaagaacgaaaaaaagtcccaaaggaatatatttaatggaatacgaaccaagaagtgagaccgcattctccatacttgtctgtaatagtagggctgcttcttttatcacataaggatcaacttccaacactaattcatcgtgtacctattaacaatcaatataactatataagtagtgaaacaattaaacaaacaagattaagaggatacaaatcctctaaaatttacctgtaacagaatccggcaacgatctttaagcatgtgaaacttggttgctagtgaagaacttgaatccggactatcaaatccagtgacaattgcagagtaaattcttaacattgcaatcttaattatgtctgccgcagatccctgggaggggtagagggagatgaaacaacacaaaatactgacatgttctgaaataatcattctcaaccaggaagagagagaaaattatactacacctgacaaatggaatttacagcttgcctctgagcttttgatttttctgtactgctgccatattttatttttgacaaaaaccgttttcttcccttaagagtctccacatatctggatcatgcatatagaaatgaatccacaattcccaaaagtaacacaagtttcactagaatgtataaacacagtgctatagtaaatcaccttttatcattgataagcagtttccaatatggtttgatgtagagatcacaaacaacaatcaacttgtgcaaattaagagattacatattttaaatattaagaaaaatatcaatttgtaataagacaataatatcttaaatcctacaaaaaaatatcaatttgtaaaaggaaagacaaaaacagttgcagaacaagagtatcttagttattgtatcactgcaaaagggatatttgagttgggatacgcaaaagtggaacaaggtctccttaccctttactgcgacaagacgcaacagcttcaagaagccaggaagcaacaccaggaaaagagcttttgaagttagcaatcttttcaacagcttcatcagaagtgcaatccaattgttctgcaaggctattggcccccataccataaagaatgccatacaccatccttttggtctgctctctctcctgagaacacacagaaacctcaggacacccagtccatcttgctgctatcattgtaaagacatcaccatcaggcttactgagaagttcaacaagtgaagagtctttagagaagtgtgccatcaatctcaattctatctgagaataatctgctgttaacagtaaccagttgtcctgcaattgaaagaaataaatgaggatagaccacaggtacaccaaatatttaaaacacataaaaccagaaagttacatagaaaattaaaggaaaaagcagagggagtgatgatggattacaaaacgacagttctgtattccaaactctaggatgacagtaatgtgcaaaagataactgctggtagttttgtattataaactgcaagatgtcaggttatgtatacaaaatgacttctggtagttatgcattaaaagtacatatgtgatagtaggttgtgtaattaggagtgtgttaggcaagaggaatcatctactatagctaagtcgtggctagtgtacagtaggaacaataagatgaggagtgacagttaggttgttgagagttagttagcctctgccatctgtcagctaggttgttgggagttagttagactctgccagctgtcaacactcaacagctggcaggttagttaatagttttgtataaatagcatcgttctggaggagaggggaagaaaggattgtattgagagaacctgagaagtgtttcagtgttgtaagggaaaagagtgttcttccttgtgtaaagagtgaaagaactacaataacagtgatccctttatttctgcgtgtactgttctgtgttggttcttgtgtgcatctgttctacctctagttgcagttagtaaagtggagaagatttctaacaattggtccaatttttcgaagaaagaatcatggatcgtgatgaggctcgatcaactgcactggaatcttcggttgcagcattgaaaacaacaaccagttaattgaaggcggacgaccactgagttgcagaaatcatccaagaaacaaactgaggtgcttgcgaaggtgttgaaatagtgcgacgacattaagatttgcgcaagatgatgaagattctcatggaacaaaaaggcatcgcgtataatgaagccaataatgcatctaaggagcagaacagtgggttggaggatgaggagtccgcgacggaacccgagctttcatcagtgttggaggacaaagcaagcgagtctaaggaagagtccgcgacgttaactacagcttcggtgctagcaatgccagacttttctcaaccttttgccattgagtgtgatgcttcaggcaaggggataggagctgttttgtttcagcagaagagggtcattgcttatttcagcaaacctttatcagaggcatccttgaataagtcggtgtatgaaaaagaattgatggctttggtcttagccatccagcattggtggccttacctggtgggaaaaaaaattctggtgtatactgatcaaaaaagtctcaaatacttgttggatcagaggattacaactcagagtcaacagaattggcttgctaaattgttgggatatgaattcgaaatcatctacaaggccggtgcaatgaatcaaatagctgatgctttgtctaggaaggaaaatgataaagaaatacaggccttatccaaaccttattggcaagatatctctgagattgaccaagaagtattggcaaatcctgtttgggggaagataatagaagatttgaaggtggatccggattcacatggcaaatacaccctagagaatggaagattatactttaaaggcaagctggtactgccaaccaattcaagctggatcccgcagctttcaaggaatttcactcttccttggcagaaggcaattttcagaggtgtacagaacttatagaaggctagcacaatccttccattggaaaggaatgttgaaaactgttacagacttggtggcagcaggctatatttgccgaagaaagtacctcacttcttcaccagccggttttttacaaccattgccaatccctaatgctgtgtgggaagatattagcctagactttattgtgggattacctaaatctaagggcatgatgctattgttgtagtggtggataggccaagtaaatatggtcattccatactattgaagcatccctatactgctaggagtatggcggatatctatactaaggaagtaataaggctgcatgggatcccttcttcaatagttagtgatagggatacattgtttttgagtaatttctagcaggagttatttaaaatacaaggaacaactttgaaaatgagtattgcttatcatccttagtcagatggccaaactgaggtactaaacgaacctttgagacatatttgagatgcttctgtgtcgaacaacccaaatcttgggctgagtttatcccatgggcagaatactggtataatacatgttaccaaggagctgccaggtgtaccccatttcaaataatttatggtcgaccacccccatctttggcaaggttcattccaggggaagtcctggttgaggcagtggctcaggatcttatggaaagagatgaagcacttaatcagttgaagtttcatctaaacagagctcaaaatcacatgacaaattatgacaataatcatcgccaagataaggtcgcatagacaagcttcaattcctataagattaaatcctaagctatcagcagacactatggcccctatcagttaaacaaattggagcagtggcatttcagttacaattacctgacactgctcgaatccaccctgtttttcacatttcccgattgaaacttgcagtgggagaacattagattgaggaagaattgccaaaggaactacaagctgaagaaaaagggatatgactggaacaagtactgggagcaagaatgtttggtccagcaggagcagaaattccacaagtattgatcaagtggaaaggacagcatgctgaaggagcgacctgggaggacagatcaaatatgctgcaacaattccccgctttcaaccttgaggacaaggttcttttccaggggggaggtattgttaggcaagagggatcatctgttgtagctaagtcgtggctagtgtatagtaggaacaataagatgagaaggagtgacaattaggttgttgggagttagttagactctaccaattgtcaacagctggcaggttagttagtagttttgtataaatagcatctttctggagaaggagttgggaagaaaggattgtattgagagaacctgagaagtgtctcagtgttgtaaggggagagagtgctcttcgttgtgtaaagagtgaaagaactattaataacagtgatccctttatatttgcgtgtactgttctgtgttggttcttgtgtgcatttgtcctacctctagttgcagttagtaaactggagaagattcctaacagagtgtgaagttatgtgccgtttgcagacagtaaattctctttgtaggacacttgtcaatgggatattgtaagagtattatttctgtaatattgtgtgtcaagaatgatcacactaagcctctatttataatcaaaggagtaattacaaaaaggaattaaatccctaaaaatcagctagagagatatattccatattcctagtttccctatttacattaaatcaaatcatatcattgacactccccctcaagctggagcatatatgtcatatgtacccagcttgttacaaatataatcaacgcgagaccctttgagagatttagtgaacatatctgctagttgttcactagagttgacaaagtcagtggtgatttctcccgaaagcactttctctctcacaaaatgacagtcaatctctctgtgtttagttcgctcatgaaagaccggattagatgcaatgtgaatggcagcttgattgtcacagatgagcttagtgtcccgcgtgtctccaaagtgtaattgttggagaacttgccgaagccatacaacttcgcatgtagcagctgccatggcacgatactcagcttcagcgctagatctagcaacggtattttgtttcttgcttctccatgagatcaagtttcctccaatgagaacacaatagccagaagtggatttcctgtctgatggtgatcctgcccaatcagcatccgagtaacagacaattttcgcattacctttgtcttcatataggagtccgcgaccaggtgcattcttgatgtatctgagaatacgcatgacagcatccaaatggctatcacaaggagcattgaggaattgacttaccacgcttactgcaaatgagatgtctggcctggtgacagtaagataattaagtctacctacaagtcggcgatatcttcccgggtcttccaatggctccccctgacctggaagaagcttgacattcgggtccataggagtatcactggggcggcagtcaagcataccagtctcggtgagaatgtccagagcatatttcctctgggaaagagcaatgccagaggcggattgagcaacctcaatgccgagaaaatatttgagcggacctagatccttggtctgaaactgactgtgaaggtgagacttgagtcggcggataccatcaaagtcatcaccagtgataatgatgtcatccacatagacaactagataaatacacagtccagaggaagagtggagtgagaaaacagagtggtcagcctcagaacgggtcatactaaactgaagtaaggcggagctgaagcgaccaaaccaggcacggggggattgcttcaagccataaagagagcggcgaaggcgacagaccagaggggcaccaccagaaacactgaaaccggggggctgatccatgtaaacctcttcttgcaactcaccatgcaggaaggcatttttgatgtctagctggtgaagtggccaatggcggatggcagccatagcaaggaaaagacgaacaaaagtgatctttgccacgggggaaaaggtgtcgccgtagtcgaggccaaagatctgagtatagcccttagccaccaagcgagctttgaagcgatcaatattgccatctggtccaacctttactgtataaacccagcgacaaccgactgtagttttgtcaggaggcaagggaactagctcccaggtaccacttgcctctaaagcacccatttcatccaacatcgcctgttgccaacggggatcactcatggcttcacctgtagacttagggatagacacagaatccaaagaggtaataaaagaaaaataggaaggagacaaacgatcataatgaagagcataagcatataaaggattaggattgcgggaggaccgaatacctttgcgaagggcaagaggaagttcagactcaggcggcggtggtggatgagcgtttggagtaggagatgatgctgtgggaccagtaggtggaagcaccggtggtctgcgctgataagttacaagtggaggcggggcagggatgactactggagctggaacaataggcggaacatgcagatccagaggagcagtgggagtagagaggaaaggggtagactcaaagaaagtgacatcagcagaaacaaggtaccgttgaagttgaggacagaaacaacggtatcctttctgaagacgagagtaacccagaaaaatacatttaagagacttggcagagagtttgtctttacctggagtaaggtcatgggcaaaacaagtgcaaccaaacacacggagaggaacaggataaatgttctcttgaggatatagaagggagtacggagtccgattattgaggacggacgagggcatgcggttgatgagataataggcagtaagaagtgcatcaccccagaagcggagaggaacattatagtgaagtaggaggttgcgagctgtttcaactaggtgacgattttttcgttcagccacaccattctgttgtggtgtgtgagcacatgttgtctgatgaataattccttgtgaggcaagaaatgactgaaagtgggaggataaatattccctagcattatcagtgcgtaaggttttaataggcgtcccaaaatgattattaatttcattaaaaaaggcttgaaaaacagagaaaacatcagagcgatttttaattaagaacacccaagtgcaacgggaaaaatcatcaataaatgtcacaaaatagtaaaagcctaaagatgaacagactcgactaggaccccaaatgtcagagtgaactaaagtaaagggtgacgcagcacttttattgactcgtggactgtaagaagaacgcacatgctttcctaattgacacgactcacactggaaggatgtaagtgtagaaagactaggtactaaaagatgtaatttttgtatgctgggatgaccgaggcgctggtgggcaagatcaggagaggtactagagacgcaagcaaccaatggtgaaagctagtacattccccaagactcatgtcctgctccaatcgtctgtccggtacgccgatcctgaataagaacagagttattaataaataaaacggagaaattaagagagcgagtgagcttggaaatggaaattaaattaaagggacatccaggaacaaataaaacagagttcaaagaaaggtgaggaagtgggtgagtttgaccaatgccacggactttaatatgagagccatctgcaagagtgacagaaggcaatgagtcggaaaaaaacaactgagagaaagagattggttaccagtcatatgatcagaagcaccagagtcaaggatccaaagtccaagggtggaagactgagaaataaaagctacaggattaccagagtgagccacggtggtcgcaggcgaggcagattgctgggctgctcggaactagaggaaatcatgatactctgtggtggaaatagtaacatcagtaggtgcggtaacttgggccacattggccgtcttcgactgctcccgggctttggtgcgacattcagcttcgacatggccaaagcggttgcaataagtacaacgagggcgacttttgccgccacgactcaacttctcgcaaggaattagaggaacattggtaaaagtgaccatagagccggcatcaccaaggggactggtagaggccatgaggaagatattagaaaagggctggacaaaagttttttttttttggagtgcgtgcagcgacgtgtggcggcgcgtgggggcgtgtgcggcggagtcaggtggcgcggtttgggagctgggtcgtcggagggaggcgatcctacccctggaggtcaccggcgaaaaaggcggcctggtgagagggaaacggtgttgaaggctggcatggtactgttcacaagcgagtattgttcatcgcagccaggaaacgctaaaaaaataaacctaaagctctgataccatgtaagagtattatttctgtaatattgtgtgtcaagaatgatcacactaagcctctatttataatcaaaggagtaattacaaaaaggaattaaatccctaaaaatcagctagagagatatattccatattcctagtttccctatttacattaaatcaaatcatatcattgacaggatatattgatgatgggaagggaaagaaagggaaagttgccttcctctagttaaaaagatttaagggaaatgttcacctttttagagagatagggtggaacaaaaggcataaaagtttaaaatcttgggaggtaagggaggggatgttccctctgttcaaaagttcatgacacgggaggggaattctttttgtcttgtttgggagttggagtggaatttaaatttcaaataggcacattaaatcactatatattcctttttaattttatacaccttattatacagatggttaattgcatgtgaagagatttactctacagaaattcaaacaccatataaaaaagaatatcttatagtaaatcattttcagtactgaaagtgctttctagttttttattttaggaattcaattgagtgtttttctgtacctttgcaacaaagatagtcttgtattaaatgatttttcagtacacacgtgacattagttttattgcattcaatggtagtaaaacccatccgagactgacaaaaaaatgtatatgaaactgggctattttatttttaagagacaaactagcatatatgaagtatcattttatacttatcaaaggatgataataataatatataaaaaaaaaaaaactgttttatttgtttaccacttttctctctcattcttttagaagagacaaaaaattattttgcatcatagctctaactatgggacgtgagacctatcccaaattttgtcgttcatttctctcattagaccagaaatacgaagagaggtgagggcattgagttctcttgaaacccttcccccttagttataaaattcccaaaaataaagcttatgttccatgctcaattgaggactacatgattgaaataagctttctgatcttgacgagaatttttttacaaaagcaggcataaaagttccatgattgaaataattttgtggttattttagagaaaataattgcgtggagattaagataagaaactcgcattaataaaatacaatttagctttttgccagagagatggactgtggaagcaaggtatttgctgtgacaattgatggagagatattgaaggaatcaaaaagtcttacatatatgatcttcactatttaggaaaaggctggctgtcaagataggtgtcttgcactaaaagcaaaaccaaagaattatcaattatgggtattaaagagattctaggatgcaaggaccaattgtaaacaggaaagtgtcttctaaaaccagagcctgcgatcaagcaacagaagtttgttttgttttgctttaaaagtgactagaataccagtaggtgtcttgcagtatctttacaacattaaaattcttttcatgatatacaccaatatttcattttgtcagcgtgacattggaaagcccattttacaatatcagcaaacaaagtcttagaaagtggataataggtctaactcaaccctacaaaactggcttataaagtgacgtttgcacctcacttatatacactacttggccatgtcactagtcgatatgggatctccaacacacacccctcacgtctaggactggacatctgttggtggtcctatagcaggcagcacaataggcccaacaacagatcactaagataggctctgataccatcttaaaaaatgggttataggcataactcattcctacaaaaccagctggtaaggtgaggtttgcacctcacttatatacactaactaggccatatcactagtcaatgtgggatttccaacacaaagaacacaagtacagaagaaacaaaaaagtaaagttaaaagcctatcacctgagtaggaacaaagaaatcacgagcattaattctacaataactctcatcagcatcaccttcattttcctcctctttcattttgaagtgtactgcgtgctcaacacactgcagcactcaacaagacagtacataacattaaatgtaataaaccaacttcaaaagtttaagctattaggtgaagacacatgaatcatttatattatatttcaaacatgctccctcattcaagagccctctggaatttatgcgtacacaatggacaaaccgcaaacccatttgccttgtcttgaaattaaactcttcattattagaaaaagaggacatttcacctttactccctgagtttttagcgaactgcgtttgatacccctctattatttgaccctataaaaaccccccaaattattaaccaagaataataccgtgtacccctcccacaaaacgccattgacactttactagaaaaagggcctaccatttcacttgcacccagtgtttcctgcaaattatgccagatactccttaattttattaatacaatacttatataataataaatcattgagtaattataacaaaagttaatgtgtgtatgtatatatatatatatatatatatatataaattaatatgtatatatataaattaatatgtatatatataataatttctttcataatttctttcgactgcagttaacatgttcattgacagtgttataataaggggagtgttataataaggggtaaaagtaatgtcaaataacggatgggatcgggcgcaagttgcataaaacacacgaagtgcaagtgtaaattacttttaaaaaaatgaaagcaaatagcttcatactctggactacttggttatatagaggtttttataccgtttcatacggtgaagaaaattgctttatattgtatttctaacgttaaatatagcagttaactgaaagaaaaagaaaaagaagacatgttaataaaataacccaaacctgaagattaggttcctccattgaaagccgaccagttgccgtggatgtctggagccaatgaccatgtaatgtatacttctgtgtgcttacagatagcctagccagcgaacaaattgatcctaacgtagagttcaacagctttgccattgttcggtgttctttaatgactggaacaatgggatgttcatgcctgaaataataatcaaatttcctagaacacggtttgcaaaaaaagaatacaaatgtaaactcctacatgttgcacacaacgcatattagtagagctgaaaagttatagaacttttaaataccaatcataaaaacatttgtgtaacctccagcatagtaaatatacactcatccagagtgtctacattttagttattcgggagatataatgaatattaaaaaggaaattgaatatttttttcatagatatatgaataactagagaaatgaaagggaagatttcttggttactagaaactatgaacataatttagttgtcagagatgacagtaagtaaccgccatacaaacatattacaagttgcatagcaccaatcctttctaacatgcttcttttgttgcccagttttaatattccctatgaccatcaagaagctaaaggaaaattatgcaaatcacgtaaaagagctacaattacattcaactaattttcttaatgatatgaaagcacagtcaaatgttttatatctgttagttagcatatttaacacatgataaatatataagtagcagttgccaaaaattagggatacagttactataacttgggatttgctttatccttatatatttaatatatttaaaatttataactgagtcgtttgaacatattacacacattcagatatattgcttctatatggtattcaaatatatagtaattgagtcaataaagtgctttgtcaccttttgctttggttcactctaatatttggggtccaatcctgtctgttcaactttaggttactattattttgtcaccttcattgattattttttctgctgtacttggttattcttaatgaaaaattgttacggtgttcttaatatatttcaaggtttctccactgaaattcaaaatcaatttggttcctctattaaaattttggacaatgcacgtgaatatattgtcttctcagtttcaattttttatgacttcacagcattattcatcaaacaacttgtgcactgctgacacactacagcaaaatcaaaagaaagaattagcacttggactactcctacccttcttcaccataatgttcctcttctcttctgaagtgatgtgcttctcatggcatgttatcttatcaactgcataccttcctctgttcctcacaatcaggttcccaattctctcttatacaaccaatctattgggataagacctgattgtggtacttataaaccccctcaatccacacatccttttgtagaggttaaaaatcaaagaaaatggatatctctgtgcaatatgaaactagaggtgtggactttgatatgcaaacctaggagtggtcaatgtcattactcttgtatttataatctaaagtgactactaacagaacaagaaagcataaaaaatcattaaacagattttcttttaatatggattatgggatacaaatgggaaagggaaagttgtttaatacctcagtgcatccaaacagtgcttgctagtactcggatgttgttttcccttattccgcacatcaggtatgggcagcttcaagtgttcatacagcactttagcaatatctgctggcatatttaatgaaaatgtcattccagccagtttataagcttccttctcaagatgctttagccttttaatcaacaatttacgagcctggatgcatctctccaaatcaacaccaattccccaaagctccatgtcagcaagaacattcacctaacatagaaatgttaatagcatcagatagtccaagcaagtaacctgttaagatcccacattagcataggtataaaggcaaagtatcccttataatgactttggaagtcctctcccttaaactagctatatgggttgattggcccaatgtattctcggttataatataatcatttaaattaattgtgtacataaaatcataaagtaaacaagaaggtaacttggtatagctaataataatcttactccgttttccttgattccttttcctaaaccgatcacattctattgtaatatgaaacttcttattcattcattcggattgaaactcaaagggttcattatatacaactagttctaatactctagaatatcccaccacttattctaatactctagaacaaggttgttaaaatcgatattttacctaggatcgggaggggggatgaaagatcgtaaatcgaggatcgtaactctgatcgagatcctacttcaatacctaaaattcttatatataatctatatgcataaaaaactcaataaataaagacacaaacctagattcatatataaatttataagtcataacataataaattcataagtacataacacaactcaataaaaatttataatatttttttaatattaaataatatttttttatagagagaatatttcatattaattaaaagatgggctgcttgaaagaatttaactgaacttgcatagcattgcaatgaataaataaaagattatgttaatgaaaaaaagttaaaaataatcatttggtccttataaatgaaactcatttaagaatcaattcttaaatgaaaaaaaaaatgcatgaaactgatgggttaacactcatttataaatggtcacaacaaccgttacgttaacaacactcttacacaaacccacccctaaatatcttctatgataccaatacgacaaaacaaaactcaccatgtgcatcagtctccaaaattactccgaaccaaaacccgcatttctttagtcttcaattcaatggcttccacacccttctcccctctctgccacttccacaaacccaccctttgcttcttagcttccaacaacccatatagaagtatagaaatagaactgtttgttcttttttttttccctcaaaggaaaaaacgaaaacaaaaaaacaaatttactgcaactgcagggagaagggagaatgcattgctagtaacctgaggggaggtcgacggcacagggcagctagtcgcactgaggaggttgtcggcgcacaaaaagcagctgggtcgcgcagggagatcatcggtaaacagtagctgggtcgcacaaaggagcaacgtcccagcacagcaggggaagtcaagcagaggggcaaggtcgcgggctcgcagcggcaaggcaaggtcgcgtttttttcgaaacgaaggtaaattttagggttttaaaatttgggcgtcgagcttgcatcgttcgggatcacagatcccacgatcctactcgagattccactccgatcttgctcacggacgatcccacccccgatccagatcactttacgccgacaagatcgtaaaatcgtgcgatttcacgatgtagattgcgattttaataacagtgctctagaatactccacaactaattctaatacgcttagaatattccacaactaattctaatactctagaatattttacactcccctcaagttgggagatatatattaatcattcccaacttgctaatcaaatcctcaaaggtgggcttgtgtaatcctttggtaagaatatctgttgtctgctctttggtaggtatatgacaaacatacactaccaccctccaatttttctttgataaaatgacgatcaacttctacatgtttagttctatcatggtgaacaagatttgagcaatattgacagcaaacttattatcacaatacaattcaattcctcaagaagtcttttttaaccagattccttcacaaataccatgggctatgcacaataccctaaagtggatcttcgatccattgccgagccagcccaatctgcatctgtatagatttcaatcatcctcttatgtctcctttgaaagaacattcctcgaccaagggtgtttttgaggtacttgaggattctataagctataggtgtttttccttaggagagtgcatgaattgactaaccatgctaaccgcaaatgcaatatcaggtcgaatgtgagataagtagatcaacttccccaccaacctcggtatggctctttgtcaacttctttcccatcttcaattcccaatttaatattaggatcaactggagtctctgttggcttgcacccaagcatttctgtttcttgcaacaggtctagaatatatttcttctaaaataaagaaattcctgccttattacgagcaacctccatgccaaggaaatatttgagaactccaagatctttcagttcaaactggtcagctaaacactgcttcaaaagagcttatctcctcacaatcatttcctgtgacaattatgccatcaacataaacaattagaataacaattttgccaccatcaaagtgtttataaaataaagtgtgatcagtctgagcttggaggaatcatcttcccttcacagcttgggtaaacttctcaaaccactctctaggggattgtttaagcccatagagagacttcttcaacttgcatactgaaccgtctcctttttcaaaaccagatggaatatactccctgaaactgaaactgaaactgaagggattgttttggaggaatagaatatgcccactgatgctgaggatttgccgattgcaataaggaagggtgttagaacatttacatagaggccaaggtatccattgtctcacttcatgtcctatgataaactgtccagcaatcatagaaatttgcttactcatttaaacactatcactatcccaaaaactgctaatgaagcactggatagcaaagagtggagagaagctatgaaagttgaaacagatgcactagagagaaatgaagcttgggagttggtaaaacttcctaaagaaaagaaacttgttggctgtaaatgggtattcacttttaaatataaggcagatgggacactagaaaggtataaggcaaggttaataactaaggggtatactcaaacagatgggattgacaaccttgagactttttctgctgttgcaaaaatgaactctattagaatattgttatctctagcagctaactatggatggagtctgcagcaatctgatgtcaagaatgctttcctacatggcaaccttgaagaagaaatttacatggaggtcccacctgggtttaactttgagaaaggaaaggtttgtaagctaaggaaggctctctatggattgaaacagtcccctagggccaggtttggcaggtttgctacggtaatgaaggcaatgaggtataaacaaagtcaaggagatcacaatttgttcattagccattcagcttcagggggagttactgcactaattgtctatgtggatgatatagttataacagggaatgaccaagcagaagtagacatcctaaaagggtgtttgttaagagtgtttgatattaaagagctaggcagattgaaatactttcttggccttgaggtggcacattctcgtcatggtattttcatctcccaacagaaatatgtgctggatttattatctgaaactggtaaattgggatgcaaactagtagaaactcatattgagcagaatcacagactgagtgaatctgttgaagatgcaaccgtggacacagaatcctatcaaaaactggttggaaaattaatctatttttctcataccaggccagacatagcttgtgcagtgggagtggtaagtcagctcatgcataatcccaaagaaataatcttagagatgtttaccgcattctgcagtacttgaaaggtactcctggaaagggaattttatttaaaaaaaggggagtaaaggcctatacagatgctgactatgctggatctgtggatgacataagatccacctccagatactacacatttcttggaggaaacataacttggaggatcaaaaaacaaaatgttgttgcaaggtgaagtgcagaagcagaattccgggttatggccttaggaatttgtgaactcctatggcttaaaataattctagatgacctaacgattgagtggaatggacctatgaagctatactgtaatagcaggtcagcaataaacattgcacataatccaatgcaacatgataggaccaagcatgttgaagtagacagacacttcataaaggaaaagttggataatgggacaatttgtacaccatttgtatccacatgaaatcagctagcagatgttctaacaaaaggattaagtagctctacatttcaatctattgttagcaagttgggaatggataacatccactcaccaacttgagggggagtgttagaatcccactgtatattgtatttccttttatagataggatttaaatcccataattaggagatttgattagctgcatattttgtatttatgaccaggaatcattgacccttaattataggaattgacagtagctgcattagtttaggagtttcattttttagattaccttgtattctatttaagagcacatgctcttctatcaatatcataagaaaattatcctttgagagtttttgtataatttcagttttattgaagtttccatgcaatatcaatattagattattagtatgtatagtttagctgaaagattatcaaaatcactttctataataagtgcttggtgtcaagatttacaatgttaatctaatccttttaagagatgccaccaaatatataaagttcaaaacataatacaatatttacattcttcagtgaaggtaaactacatcaataaataaacattaagtctacataaatatatcaatatgcaagataaacaattttttttttttgatcagcaaagataataatatatatatatatatgtaaaagaacgtacaaaaagaggtacaaaagtgatctaacataacatgacctatggcgacgtaattcataaggaatcatgaattaagcagccagaagtctggttaggtcaaaagaaattccccaaaacaggggaaagctatacaatatttctcccccttggtacaaagatgttacccatgttactagaccatacatggaaaggtatattgaatcccttttctagtgttctaacccatgtccaacatgtaaaaatggcatcatccataatcttgtgactattgaagctgtcattgtgaaagatgatgctattcctatgacgccatatggtccagtttaaggctatccaccatgtaatccaccactttgaacagatcccgactagataatagaaagaatgttgacaaaaatgttccttaggagttacggaccatacacctataatagaattccaagccatagattcccaccacagaggcctaattttgacacagttataaaagaggtggcctgcatcttcctcagtatttttgcaaaatggacataatgtatcattcataaccacattcctcctactaagatttgatttagtaggtagtctatccccaagcagtctccatgcaagtgctttaagaggagctcttgtattccaaagatccttgtgcacctgactttgctccagaggtgtcttttgtgcatatagaaatgagtatgcacttcgtacagtatatataccattaggttcagcctcccacaaccagacatcaggttgttgtgggtttatacccatttgccctacgtcttctatgaacttgacagcagctgctaattctgaatccataaaatatctcctccactgaaaatgccattcccatcccaagtgtgaaaatgtgcccatttgctgaatatactgatgatgttgtttggatatctgatacatgcgtgggtatttagccttcatagtgatcccctcgtttttccaatcatcttcccaaaataatgttttttccccaccaccaaccttccatgatatccccgatttcagtccacagcccccatcaatgggaaagcatgttattcgaagatctctccaccatatagattcaccgccaccaccactagcttcagccaaatttctccagcccccatatttggatgtcaatactttcacccataattcctcatgttgatgatgcatattccatacccatctcccaagtagagcttgattaaaagttggaagatctttaatgcccaaacctccacactccactggttggcatatcactttccagctagcccaagctatttttttctgttctgcagcacctcccagaggaaacttcgttgaatacgaactaatttattcaacaccttcataggcaccctgaaaaaggaaaacaagaaaataggcatagaattaagtacagacttaatgaatataactctccccccaaaggaaaggtatttccttttccatgcagcaagctttctctcacacttggtcaccaagggatcccacatctcacaccttctagggttggccccgataggtactcccaggtacacaaaaggtacttgcaggtttctgcaattaaggtatgatgctgcagcattaatccaatagtcatccaccccaaaagccgtaaatctgcttttggcaaaattaattttcagtccagatgccatttcaaatcccctcaacatagccttcagagttttgatatttttggtcgagcctttcccgaaaaaaatggtgtcatcagcatattgcaggatgctgatatcaactaagttgttccccaccttatatccttcaaatagatctttctgtaatgcttctcgcataaggccggtaaggccttcagctactatgttgaacaataacggagctaaggggtctccttgtctaagtccatgttgtggtgagaattccgcagttaggcttccattaaccaataccgaaatggatgccgattttaaacacccttcaatccaagtaatccattttggcgcaaaattcatccttcgcatcatgtagaacaaaaagtcccaatttactgagtcatagactttttcataatccactttaaaaactaaacagcttctgttattcctttttgcttcatccacaacctcattggctatcatcacgctgctcaaaagttgtctgccttcaataaacgctgattggcgataatcaatgactaatggcagaaccttcttcaatctgatggcaagcactttagcgacaattttgtatacacacccaatgagagaaataggcctatagtcgttcaggccaagtgggtcttgtccctttggaatcaaggcgataaaagaggcgttaccacctttagggaagaccccattaacgaaaaattcatccatgaatcgaagaaaatctggtttgagtagctcccaaaattttttgatgaacctgaaattaaacccatcaggccctggactttttccgttgccacacgcccatacagccgctttcacctctgctacatcaaacggtgctgtcaaatccaggttatgttgctgttctagccttttaaaagtaactccatccaggtttagattcaccctgtgaggtgcctcaaatcttcttttgaaaaatgatcgagtttcagctttaactctagatggctccacaatccagcttccatcaaccaaaacgcctttcagcaagttatgtctacgcttccagttcacagttatgtgaaagaaccgagaattacaatcccctccttaatccatttagatctggccttttgtcgaaggatagatgcattggatatggctgccttccacagctcttcctgcaactgttttcttctcacaatttcatccgggtttagttgcctatcctcagtttcagtttctagtttgttgatttccgactcaatagtctcccatttctgctgcgagttccgaaactgagatttattccattctttgagcttcattttaagttttttgattttttctttgagagcaaaacccccccaaccatatatcacagtagaattccaacaatcattgaccatctgatagaatgacttatcctccatccagcaatccaataccctgaagggtttagggccccaatccacagtacatgagctgagtagaacaggacaatggtcagaaaaatttctatccaggatggtctgggttgttgcaggccatttatgtagccagtcagctgagactagagcacggtcaagcctactctttgcagtcccattaggtctgtaccatgagtatttacgtccattgcaaggcgcatcatccagctcaagctcgtcaatccatttgttaaactccttcataatgcccaagtatgcacctgtatgacctatacccacacgctcttgaggtcttctaatgctgttaaaatctccaattatgcaccatagtccctccaattttgcaaacctcaactgctttatactttcccacagctgtcttttctgtgcagtctcgcaaggtgaatacacattgacaattgtgattgtagaatcatcggaaacccatttgccctccaaatataaatatccagcatcaatcaccttgttcaccaacttaaacgtattattattccacaaacataacaaaccaccaactctgtttactgctggattatattcccactgaacatcattatctccccataaagcttgacatagcgttctgtcaataatatcttttttggtttcttgcaaacatatcatatccaccttttgtgataccatcaatcgcctaatggctgcccacttaatccccccaaccccccccccccccaatcctctagtattgtatgagaggatcttcataattgaccactactgcttcccatcctttgtttctcagccatatctctgatctccaggagtgctatttcatttactacctctgcttgattaggactgttaaagccatcagttttgctatttcccattcttctttagcatctttcttccattcatccagattaggacattgggatgatgaggaagaatgcggatttatatgaggttgttgtttttgctcccataccatcacatctttcagcccattgctgggagatatgcttggagatgtatcagactggggttgcacaatgtatgccactgttcggcccttactgagttgcgaagggctattgccaagctgaggaacctccactactttagaccctattagagcatgtaagtgctgttagcttttgctaacagcactcctttgtaaataagctgtagttagcaattagcaaggtgtagttagtaattagctttttattttgcacacctgtatgttcactgaagctgcaatgcacagctgtcagttttcatctacttagtggtgagaggttataaatacctcacatgcacaatttgtaactgattgattcattatttctaataaaagtgaaactcagttactgttcatctctctctctctctcgttcagtttttgtaacatggtatcaagagctaaatttttgcactgatcaagcagtgcatgttcatccgttcagccgttcgtctcagtcttcttcttcgttggaatttttctactgttcatgcgtctactgttcacgcatctacagttcacggtttgatacttcattgtgctggctcttgttctttcatacaacttcgattggcttcgtctgacctaaggatctctctttcggtgctgtctgtcctaattgaagctgttttgaacttctttatcagttcgttactgttcagacgcaatttctctctgttcgcgactttttcggcctcgtgattgttactgttcattcttctgtttacgttcggtctcgattgggcttcgatttatcttttcgtacatctctgtgatgttaggagttaattttggttgatttccttttcagaattgagttttcctaaatctgtttggatcaattctgtttgctgacctagcttctgcttgctcgtggtttggtctgttgttgcttattttttttttttttctctatggcttccgcttccgctccgtcaggtttgggttcacattcctttccaactacgattgctgaaaagcttgatgactccaactatctccattggcgtcaacatgtggaaccaatgttgaaagctcataagcttcaacgttttgttgttaatccggtaattcctccaagatatctgactgaagaagatagtgttgctgatcgagtcaatcctcaatatgaggcttgggaagtacaggaccaaaccttacttgtttggcttcaatctacactttccaaatctgttctgtctcgagttcttggatccactcattcctatcaagtctgggaaaagatccatgaacacttcagtcttcatactaaatccagggctagacaattgagaactgccatgcgtgcagtatcactttctgacaggtctatggatgagtatctcagaaaaattaaaggatttgtggatgagcttgctggtgtaggtgttccagttcgtcatgaggaatatgttgatgctattttggaaggacttccttcagactatgcttctgttattgctgtcattgaaggcaagaaaagaactccatcaattgctgaaattgaagctttgttatatggtcatgagacacgcataaatcgttacaataaagaaactcagctgttgagttctccttccttgaactatactcaaggatattcaacttccaattcacataagggtggtaattctgggaatttcagaggaataaataatcatggccgtggcagtatagctggtagaggacgtggcagtggcaaatttgccaattttcagtgccaaatttgtcttaaatatggacgcactgcaaatgtgtgtcattttagaactaatgcacactttcagcctcatgaatctttagtgttttttgatcctgtcacttctcagcctattccttataatcttggttcatccagatttgatcatacaaggccttctaacacttgggttaacctaatttgaaatctgcaacctctgttcctaatcagcccagtgctatgcttacaaacactgtatctcctggatctggtgctgatcactcctcctggattccagattctggagccagttttcatgtcactggagatcctcagcatataaaacagtttaatcactttgagggacctgatcaaattttcattggtaatggtgaaggattaggtatctatggtgctggtacctcttcttttatttctccttctaatagtcacttcacctttaaattacaaaaattacttcatgtttcttccatttcaaaaaatttgttaagtgtcagtaaatttgccaaggataattctgttttctttgaatttcatcctcatgtttgtcttgttaaatctcaggaaacaagtgaaatcttgctccaaggttcagttggagctgatggtctctattgctttcataatctcaagcttcaggatatttctcctcagcttttatccacttctgctgcttcctcaaaacatacaaattctgatctttcttttccctgtaacagcaatgtttggcacaataggttaggccatcccaacagtcatgtaatgagacttgttctcaaccattgtaatatttcacagtctaataaaaatgtttcagatttttgtgcatcctgctgtatgggtaaatctcatagattaccctcttctccttccattaccacttattctcctttagaactcatatttactgatttatggagaccgtctcatttaacctcctttgctggatataagtactatgtgtcttttattgatgccttttccaaatttacttggatttttcccataaaaactaaagctgaaaccatctctgttttcaggctttcaaaactcaagttgaattgcaacttaacaccaaaataaaaaatgttcaatctgattggggggggtgaatacaggccctttgctactcttttatcatcctatggtatttctcatagacttatatgtccccatactcatcatcaaaatggtgtggttgaaagaaaacatagacacatagtggatttgggccttaccttactgcatcatgcctcattaccctacagttttgggattatgctttcagtacaactgtctatttgataaataggcttcctactgcctctctcaactttgatattccttttatcactctttttcacaaggatcctgattttaggtttcttagaacctttggttgttcgtgttttccccttctaaaaccttacaatactcacaagctgaatttcaggtcacaagagtgtgtgtttttagggtactctaattctcataagggctacaaatgtttgtcttcttctggtagaatttacatttctaaggatgttttgttcaatgaagggaggtttccttattctgaaatattttcaaaagattctagtcctgaaaaacatcttgattcttatttcagtctaaatccaaatttatctccacctgctggcttgtctacttctatacggtctcagcccttgtcatctctgtctattcctactcccagtgttcctcctggtttctctcctatttctggtatcaatcctactgttgttccatctatttctcaacctgtcaccactgttgagtctgagtctacacaaaatagtgcctctgaaaacattgttgtgactgattcctcttctgaatctgcttctgtacctagttctattcctgctaacactcatcccatgcaaactaggtccaaatctggtcttcataatcccagattacatccttccctatttcttgttcattctgaaccaaaaaatgtgaaacaggcattggcagattcaacctggcttgctgccatgaaacaagaatatgatgctttgttgaaaaataatacatgggagttagttgctctacctgctaacaggaaagctgttgggtgcaagtgggttttcagggttaaaaaaaatgcagatggttctgttaataaatttaaagccaggctagttgctaagggcttccatcaagtgcagggttttgattttcatgaaactttttcacctgtaatcaaacctgtaaccataagaattgttctctctcttgctctttctcatgggtgggagttatttcaacttgatgtaaacaatgccttcctaaatggtcttcttgaagaatctgtatacatgacacagccaccaggttttgaaaatgctgataaaaccttggtatgcaagcttaacaaggcactatatgggttaaagcaagctccaaggcagtggtttgacagattaaagtccactctacttcagtttgggttcataagtagtaaatgtgattcttctctcttcatttacactcatcagtcacatactgtttatctactggtttatgtagatgacattataattactggaagctccaaagttctaattcagcagctcaccactaggctaaatcatgttttttcactcaagcagcttggacatttggattattttttgggtattgaggttaagcatctgtctaatagttctattctcatgacccaaagcaaatacattagagatttactgcataaaaccaacatggcaaaagctcactccatctcttctcccatggtttctaactgtaagttatctaaacatggtgctgatatattttctgatcctactttgtttaggtcagtagtgggagcattgcaatatgctactctcaccagaccagaaatcagttttgcagtaaataaggtttgtcagtttatggctgttcctcttgagtctcattgggcagcagttaagaggattttaaggtatcttaaaggaaccgtcggtcatggacttctgttcaaatctgttgatgttagccagcctctacctcttcatgccttttgtgatgctgactgggcatctgatgttgatgacagaagatccacttctggttctgctatttttcttggccccaatttaatttcttggtggtctcgcaagcagaaagttacagcacggtctagcactgaagctgaatacagaagcttagctcaaacttccactgaactgacctggattcatgctcttctcactgagttaaaagtctctttcaccactcctattttttgcgacaatcaaagtgctgtttctattgctcacaatccagtgtttcatagtcgcaccaagcatatggaaataaatgttttctttgttcgagagaaaattctggccaagcagctgtctattgtacatattcctgctttggatcagtgggcagatgttcttaccaagccgctttcttcttccagatttgtttttctcaagaacaaactcaatgtgaaaaatgtttcttctgaaaatttttccctttgagtttgaggggggatattagagcatgtaagtgctgttagcttttgctaacagcactcctttgtaaataagctgtagttagcaattagcaaggtgtagttagtaattagctttttattttgcacacctgtatgttcactgaagctgcaatgcacagctgtcagttttcatctacttagtggtgagaggttataaatacctcacatgcacagtttgtaactgattgattcattatttctaataaaagtgaaactcagttactgttcatctctctctctctcgttcagtttttgtaacagacccatgatcttttttacatttagtacctctggaatatactttcaattttatttgtggcccaattaagttgaggtccaaatgactaccttcaccaatttgttgctttttcaaatcaggatccccacacgtgatatccctatccctgccctcagaaacctcattgaccccacctgcctgtgcattactagaagtaaccatgagtgggtccccctctttcttgtcacctttcgtacaaatttgctgttgaccatctacaccaggctgatttgcctctttatccagtagacccgtctcctctccattgtggggacccgcaccacttttgaactctggactcccttttggtggatgtgggtccctccccgagaagctgaattgttgactgtcatcaggcaaatttgaattctgacagccatgttctatctgcatattatcaccaagccgcacagtgacctgatccacttctggggtctgactttcgtcagaaatgtcacactcagcagcccatttagtgaaagctagccttctcttttcaccaaaggtgtgtgagcaggtcccttcaacagaaatcctattactagccttgtcagcccgcactcccatttacccagtgggtattacctctttgtcggcactgctcctgcctccctgtgcaattccgaccaccggcatcagcatttccgatgtttctgcaaccaccatgtcctccatactatcatactcgcaccctaagctttcatcggaagatctgatctccgatgaagatgcaccagatctccactgcctcgcacatgcttggaagcatgtctcttcgactatgctaatcctgtagacttcgttgtttatagttgccatgatcatgtggttgatagaaggttgccaaggggtttttatgaggaccctagctctatcaagacggttaaggtctaccgtgtcatcatccaacaccaccaggtctcctattccggcaacaatacacctgatgtactcttcttcccaagcgtgtagcgggattccccaacatagcacccataccaacctacagccaaccttcaaaccaggatgccatttttccagggcataaaacatggacactccggtcgtctccgcctctctacgcatttcctccaccttgctgtcattaaggccgatgaggagtatcaaatcatcacccatgtatctcagcctaagatccccatctccattccatagaagctcctcatcaacccgatcatagtcttttaaattagtgagtctgcccacccaggccccattataccatttgttacttcccatcggaatagataagctaacggtggattgagaaggttttccaatcgcctaatccttacgcttaggtggccttctcctccatggctgatttccggttttaacagcttgagcataagagatggttcggttcggggggtgttttggtatctgcgaataatcctccatcagaccctcgggatcttcgtgaaccttggccttccctttatcgaatgcaatactggttttttccgatatccaccttccgcgttgctcatgtgagttcatgttcagctttgttctctgctccctgtcatgtttggggcggtttacatgcatcttcaagcccccaacaatctggttatccaacatcctttccagccttcctacgtcgtcaacccctttaaatctcacgaacccatatcttctacctagattattcctttttctcgggataaaaacctcacgcacatcaccccaccttttgaacacataccataaatctttctcattcatgtcttctggaaaccgggtgaagtaaaaagtcgatacatcactatcctccctccagtttttccggtgagattcccgtctaaatctgctaccagtatcaacaaggtactgatcgtgcccattacccttgaaggtgagatggggtttccccctcggaccatcattacgactctcaaagaacctagacctaaagtttcctctagcccacccagtgtttctctctctaactttttctctcatctctctacaagacctacctacgttcagacctcatcttattcaagtgcttcagtgcattatctgtaacagaaattgcaggggccagagacccagatgctggtgcagctaaaggatattgaggtgggggtgagtgaaagcaaagactaaaaaagtactgagcatggcagaaaaagtatttcacataacacacacaagtatataacaaaattcaaagtatactgtttagctgttgcaatctagttaatgatattaaaacagagtgaatgtcaatatcagaaaactccacgtttttctgcaagataaacaaataacttgtgcaggaactaacttccccaaaaacttaagctgttaggtgacatatgcacaattttacatcgaatattctccttcatgccaaagcgggttgaaattatagataatccacaaccccagctagcagctacattgagctgtgaaacccaacttctatttggtagtatagaggtaccaaggatcaaattctaggccacttggtcatagagattaatacgtaataccatgtcaagaacctcacaaaagataaaatttaacatataaggtgaaggctcatatatctaatataattttttttattttttgtgcatgttgcaggtgttagaaataaaacaaaatccttaagaacggaccaagctgtgttaagtgaatggttaagatgtatctggcacatattgatgaaagagttctaagtaaatccaaaaattgttcaatattagttagatatttgttttattttgataactattcaatattagaatttatattttattgtaacgcatacagacatgcatacaaagaaaattgagtgtaaaatagacatcacacataataccactctttgattataccaaagcttcataaattcttaccaatggggtttctatatccataagcacttcaacaagtttctcagaaacaagtaatttccaaagaacagaacataatgctcgtatttgagcaacccgacggcagcaaccattatgagcagcccttcgcatctgattcctccacctgccactctgattggcaactgcagcgtcctcagaggataacctcttctttacctcctatattatcaacataattgtaacactagtaagatacactatcaaatcatcacaaattgatgataaaaaagtgaacatgtttgtacatttatgtatgcagtacaagtatttacattaccttatccaggtttggactagagctactctcttcatcaggccaaagaatccaagccacaatgcacatatcaattgcatctttaacatgtattgggggcaataagacataagaattgtctacaacttcaaggtacatagtttttccaagtgtgtccaagctaccaaatctctgaactgtaaatgctggccttttcagcacctgcatctgaatcttcaaattccaggtgaactttctgacatttattttccctattattttactaattctgttccatctagatctagcaatctctagatcttgcttagaattagaagatgaaactttcttcttatgactgcatgcactcaaggataaacagctatcttttttactgtcagacaacagaatatctctgggaagattaatgtagtacacagaagagttttcccaacaaacagctatgccatgtatttcaaagggggcagtagagtgcaattccaatcgtttgatataatggatatcaaaatagaactctggcatagagtcccatagatccaaaaatgaatcaagtccgccaggactactaactgcattaatgggacctttctggctggaactaccagcattaccacaagccaaatttccattcttatgtcgatcctctgtacaacgagcatagcacccatcatgtacaccagatttatcatttggtttctgcaattgaacagagagaatggtcatgtctgcatttttggtatggtcagaagtcctattgagttcatccattttaggtcctgcaactggaacactggacaagctacatatcatcctgcttgattttccttctacagaagccacagcaccgttaacagataattttattaaatcttctctttctttatctaaagtaaatttattagtattatcaatgcaatctgcatcaacaaaactatgactagtatcagttgtgtcacttccagaggtacttccagttccttgcctgatagaatcacaagcagcagtagataatatgcgaggagcaaactgtgggacatggaacccaagtgatttaaaggctgagaaagcagcattacttgcctcctcagctttatcaaaaacaatcttgcgagcaccattctttatcttttttgctataccaaattggaagcccctttgtgcagaaccttcaaaagaaacaacatcctcaatatatgaaaagtcgaaagcagcttcacagactccaagttaaaagattgatgtaatgaatttttttttttgtgatcggcaaagatataatattatatatatgaaaagaagtacaagaggtactaaaaatgttaatccagttattttagttccatatttaccatatatagtttctagggataatcaatattatctcaaactcgaccaaaatatcaaacttaaaccaacagaaaagaattcagataacttaatccacagatcaccttctgtggcccatgatgaagattcaaaaagtgcttttactatctcaggaatggatgcctcagaaattgcatggggtgtacgtaaacctgctttatagagtgatctggctcgagaaccctgcaaattgaatgaaagaaacagggcataaggttactagtacaagccaataaaaatagaagttatattaaggagtatgtcaagctatcatagaacttgagcatgcttactttaacatagggaatggtggtgagttctacaatctctgctttaactccaaacgatacacggttttgaaacttagcaactaagccttcaagatcatgccacccaagtcgctcacaaaacacagcaaccatagatgcaaacctaccagcattctcttgcaaggcttgaaccattcccctggcaactctgaatgcttcacaaacctcacccacaggaatttcctacataaaatcacgtttattcaagaaacaatataagctctaatgaaattccaagcattagatggaaagggaaaaagagagatgaagacaaaacagaaaagagtaacaataattactgatgagactcttaatacataaagctggcctaatacccctattagcctatttatatgaataacgtaggtatagtgcaagttcagtgcagtgtgcagtcactactagccaagcccaatagcactgacagcatacaaagaagtactctaacataggatgtgttaatattgaaacacaaaatactaaattgcatagcttgttacagatgaatattagagatagctatatacaaggggtcctgttatattagtagttcttcaattacacaagcacttaaacaagaccatcgatataacaggagatatgctttgtaatataacacattgatctatcacatatcggatctgttaagatgaagaggaaacaagagacatataaccaaacccacacacagcaaaggctctacaacatgcactaaaaatcaaaattacaagaatcactaagtattccaatatccaaattactataattaaaaaatactattaacctatctagatcatgtacaatttttccaacaagatctaatattattgacagtcattctctcttttccactttttcctcctcttccacctaatcaaatcattttaacaaaatacatacaaataaaaggcaacttaaaaacataatggttctataaactacagcttctaatgggcttagaaacaatgacttgcaactacaatcagacagaaagcaaacacttgggaaaggcaacaaaatgagaagatagctacattgatgcacaaccaaaagagcaggctgacaagtagtgaagcagaggaaagatggactctgctgaaaagatacagggcacgaatgcaaaagcaattatggaaaaaagcacactgcaaaagagacacatttccctggcaacaattataaacaagataacttaaagaagaaacatattcaaaacaccaattgaaaacctcaaacagaatcaattacttcaaaattgagctcaggagaccctaaagaaaaaggaaataacacgagttctcaaacacgggcctgctaataaacagatcatttaaaggttgctcaagcaattcagacaattcagtcatattagtgtattaagtaagttttacttgttgattcagttagagcagctgttattctgttagaacagctgtgattttgtttattctgttattctgttagagctgttatttctgttactttgttttctctataaattgagaaacagaatctgttgtaatcactttttcattccgaatcgataatatcttctatcttttttcttccttctctctctctctcaaactctatgatggtatccaaagcttgaggtccatccatggcgacaaatcagaattccgcttccgctactccttttcatccaatttcttagaaattagatgattctaaattcctgctatagagacaacaggtagaacctgtcatcaaggctcataaacctcagcgtttcgtggcacgtcctcagatcccgattcgctttctcacagaggcagattgtgaagctggaaatgaaaattcagcatacccagattgggaacaagatcagattctcttgtcgtggatccaattgagtctttcagtttcaatcctatctcgcataatcggatgcattcattcatatcagctttagggagcagattcatgagtattttcaaaagcaaacacgtgcgaaagataggatatttcaaacagaaatcagaactacaatgcttgagcagaaaacaatgcctgagtttcttctgcgcatcaaatgcatagtcaatgtgcttggatcgtgtcgacatcctgttcttccacatgaacatcttgacgtggtttttgaaggcctactagaggagtacggttcagtaatctcaatgatagaaagtaacatcgaaccacttccgattggagaagtagaggaactgctgctcgcacatgaggcacgcatgaaaaagtttcagaagtttgctgcttcaccttcaattaatgttgctcaaggttacaattcatcttcgaattcttacaattcgtcctcgaataatttcagttcagaaaatcgatccaattattttagaaatcgtggtggcttcaatcgtggcggtggctaaagtcgtgcagacaatgattctgacctggctacagtcgtggaggcaatgactttagccacggtcgttatgcaaattttcagtgcgaagtttgctacaaatttggtcacacagcagtggtgtcattttcgctatgattctgattttcagccaaaagcgactctcactctgatggaaccagtgtttaaaagaaaatcatcgaacacctttggttcataacagaatcagggaactaattctaacagacacccaacctagtgcaatgctgtttaattctgaaaatcaagatcctaactctactacttggatacctgattctagtgcatcgttccacgtaactagagagtctcaaaaatccagcagcttggttcatttgaggggccagaccaaatatacattggtaatggccaaggcctttctattgagccttctggttacactaagtttatttcccctattaatctagagtctctctgtccttgaaacaattattacatgtacctgccatcactaaaaacttgtgttagcaaatcttctatggataacaatggtttctcttattatatcattttctgtttttcagcaatttaaaaccatggctgaactccaatttgataccaaaattaagagtgttcaaacagattgggaagctatatttagacctcttacctcatttcttcaaacccatgggatcattcacaggctaatttgccctcacacacatcatcaaaatggtgttgtggaaagaaaacacaagcatatcattgagttaggcctcactcttctcaaacaagcttctctccctttaaaatttggggattttgccttccaaactactgtttatttgataaacagacttcccactgcctctcttaaatttcaagttccttatactgttttgttcaacaagtcacctaattacaattttttaggaactttgtcttagattctttagaatgtgagtttgggcctaactcaacctcaaaagctagctcaagggatgaggattgcccctcacttatatactctatcttggctttatctttagccgatttgggacttggatttttccctattagaacatgtaagtgctgttagcttttgctaacagcagccctctgtaattaggctgtagttaacactttgcttattgcacctctccctgtacagctgtcagtacagttgtcagttctgttattttcagttagtggtttttttattatttcagttagtgggttagcatcagatcaagaggttataaatacctcatttgtacaaagcttcaggtaattttttataacagagaaataaaattcagaacttctttctatttccactctcttttgtttattttgttcaacatggtatcaagagcaaaatctttgcattgatcgtacagtgcattgatccctttcatccttcgttcaatctcatagtcctgtttggatcgtgttctgttgagtttgttactgttcattatcgcggtttctctgattcacgatagcacctccattgcggatgcttctgttcacttgagagcttgtgattgatcctgttcttgcttgcgtttctcttttcggctttatctatgctgtttggtaatggtttcggctcatttactgttcgtgactgggttcttggtgaattcgtttggctcagacttgttcgcttctctctggttctttctgtttgtgtttctatgcgtgttcattgttcattaatggcttccggttccgctccgtcaggtctgggtacccattctttcccaaattctgtagctgaaaagcttgatgactccaactatatccattggcgtcaacatgtggaacctgtgttgaaagctcataagcttcagcgttttgtggctaatcctgttattcctcccagatatctcactgaggaggacggtgttgctgatagggtcagtcctgagtatgaagcttgatatgaattcaggaaatagaagttcttgaatcttcaatcaaacacagaaaatactgaataatatgctgaatctttatttctaccaagaatagcttttacaatgtagtagaaaaaattaagagtgataaattcctaattcccaagagaccattgtctcttacagatatttcccacccaagacaattattttccacacacccactaacacccactgctactctatttataacctattcaacaaaacactcactctacttattacctaactacccctgcacttaattatttttatttctccttttgtacacttgccattccctaatattattattttcttctcttggtatcaactgctgatctgtatcaataccaccctccctaaaatcaaacttgtcctcaagtttaaaatcaagaaattgactctgaatcatgtcatattcttcccaagttgcctcttccttattctgtccctgcatgccaactgaagtctggtggctttggtggtgggagcattactggttcagtaccttccttcagccctggtccatggttgagctgtcaaccataaatgcaagacccttgtttttagtgtcacgtagggaaatgactctgcacagctgcatagtcctaacctgcactaatctcctcaaaaatgatttcagaactggattcatatcaccttggaaagtagctgggattgtagcataattcaatagaatctgttctggtccagttttcaaagattttttaatggccctggatgaaaccatttcttgtgatagacttgggttcccataaataaccattgtctgtccatcaacaccgaattgcatggttagtttcctccagtttaccttcacctctccaagtgtctataaccaagccactcccaagatgatgtctactctgcccaactcgaaaacagagaactctcccctgactgtgtggactcccaaatccaacaaaatgtcatcacaacatccattggacttcagtttctgctcgtcaccaagtctgaccccgaaaggctgtgtttctcgaatcttcaatcctaacctctgcgtcaaggaccttcccaaaaagtagtggcttgctccactatcaataagcacaaggactgaatttccatttgtggtcccttgaagcttcatagtctttggttgagttaatccatctggcgagaacaaagataattccatccatcttaattctttctcactctccctttcttcctcatcgatattatgcaattggatgtgggcagcttctaaattttcttccgtatcacccaattcatcttgctctcccattatcatcaccctaatgttcttctctgcacatctatgcatgggtccaaaaggcaggccacactggaaacatttaccttctgcccttagcttcatatattcagaataagggagattccttaccggattatctcctcgctgaaacagacccgtgtttcctctctccattgatggggaagggggtgttcttgccgcaggtttgtcacggaagtgggttccccgatgggtttctggaatggagttgctttggttcagtccattactgttttgggccttgtaagcaaaagctgaaccggacccacttatgcgagagtttgtcctaaccttcgtatccatgctggaccaaagaagttgcagcgattgctcaatgtccctagcaagatccatggctctgcaaacatcttttgggtcatggatacgcaccctactccacagctccgccttcaagccacccataaaaaatcccagaagcaactcttctgcccccattggaatttgggccactaaagattcaaaatcttggatgaacttgtccaccgaagctccttgcctcaatcgcgaaagctgttcataggcgttgcctaggtgtcttcccccaaatcgtcgcatcaaagctgttttcagtttcgaccaagtctgctacggatctttcttcatcaagaatcgaaaccatgctatcgttggtccttccatactgacgaaagccatcggaatgcgctcatcttccaccacatcttgcatttcaaagtatgtttctgcgcaagctatccaacccaaagggtcatcgcctacgaacgttgggagttcgattctcttggtaaaagaacgacccaagattggttaggtgttggatcctccggaattagcttcatccgaggagtctagcccacgtttctgcaccatgtcacgcatgaattcacacatttctctaatgctgtccaatttcttgttcaccatggccattgatttctccaactcttcaacccttgatttggaagatgccattgctatggaccacggcagatcggaccaattgatatgaatttaggaaatagaagttcttgaatcttcaatcaaacacagaaaatactgaataatatgttgaatctttatttctaccaagaatagcttttacaatgtaatagaaagaattaggagtgataaattcctaattcccaagagaccattgtctcttgcagaaatttcccacccaagacaattattttccacacaaccactaacacccactgctactctatttataacctattcaacaaaacactcactctacttattacctaactacccctgcacttaattctttttatttttccttttgtatacttgccattccctaatattattattttcttctcttgggatcaactgctgatctgtatcaaagcttgggaagttcaggactagaccttgcttatttggctctagtctacgccctccaagtcagttctttcacaagttcttggatccaaccattcctatcaggtttgggaaaagatccatgagcaattgcacaccaagtccagggcccgtcaactaagaactgcaatgcgtgcagtgtctttatctaataaatctatggatgagtatctgagaaagattaaatggtttgtggatgagcttgcaggagttggtgttcctgttagacatgaggagtatgttgatgatattctggaagggcttccttcaaattatgcatctgttatcacaatcattgaaggcaagaactccttccaatgctgaaattgaagctttgtaatatggtcatgagacacgcctaaatcgttataataaagaaacccaggtgttgagttttccttccttgaactatactcaaggttactcaccttccaattcacataaggcaggtaattctgggaattccaaaggtgcaaacagctatggccgtggcagtacaggggctggcagaggatgtggcagaggcaaatttgccaactttcagtgccaaatctgtctcaaatatgggcacactgccaatgtgtgtcattttaggactgatatacactttcagtcatgaatctttagccttttttgatcctaccacttctcagcctattccttattcttttggttcatctagaccctcaaatacttggatagatcccaatttaaaacctgcagcctctgtccctaatcagcccagtgctatgcttacaaatactgcctctcctgggtctggtgctgatcactccacctggattccagattctgaagccagcttccatgtgactggagactcttagcatatcaaacagtttaatcactttgatgggcctgatcaaatattcgttggcaatggtgaaggattaggtatctacggtgctggtacctcttcttttatttctctttatgatgatcacttcacctttaaattacaaaaattactgcatgttccttccatctcaaaaattttttagttgtcagtaaatttgccaaggataattttgttttctgagtttcatcttcacatttgtcttgtaaaatctcaggaaacaagtaaaaccttgcttcaaggatcagttagagccgatggcctctattactttcacaatctcaagcttcaagatatttctcctcagcttttctctacttcagttgattcctcagcaaatataaaatttgatgtttcctttccttgtaatgttaatgtttggcacaataggttaggtcatcccaatggtcatgtaatgagacttgttctcaatcattgtaatatttcacaatctaataaaaatgtgtcaaatttttgtgcatcttgtatgggtaaatctcatagattaccctcctctccctccacttccacttattctcctttggaacttatttactgatttgtggggaccttctcatttaagctcctttgctggttataaatactgtgtctttcattgatgctttttcctggtttacttggatttttcccataaaaactataatagaaaccatctctgtttttttcaggatttcaaaactcaagttgaattgcaacttaccactaaaattaaaaatgttcaatctgattgggggggtgagtacaggccattttttactcttttatcatcctatggtatctctaatagactcatttgtcctcacactcatcgtcaaaatggtgtagttgaaagaaaacatagacacatagtggatttgggtcttacattactgcatcatgcttccttacctctgcaattttgggattatgcttcagtacagctatctatctaatcaataggcttcctactgcctctcttaactttgacattcctcttaccactctttttcacaagagtcctgattttaagttccttaaaacctttggttgtgcttgctttcctcttctaaaaccttacaatactcacaagctgaattccaggtctcaagaatgtctgtttttagggtactctaattctcataagggttacaaatgtttgtctccttctggtagaatttacatatctaaggatgttttgttcaatgaggtgaggtttccctattctgaaatgttttctaaatgttctagttctgaaaaacattttgattcatatttcagtctaaatccaaatttgtctccacctgttgggttgtctacttctatacaacctcagccctcctcatctcattctcttccagctcccagtgttcctcttgggttttctcctatttctggtactagtcctactgtttttccatctgtttctcaatctgtcaccactattgaatctgggtctgtacagaatagttcctctgaaaatattgttgtgattgattcctcttctgaatctgcttctgttcctgctaacactcatcccatgcaaactaggtccaagtctggtcttcataatcccagactaaacccttccctttttcttgttcattctgaaccaaaaaatgtgaaacaggcaatggcaaattcaacttggcttgctgtcatgaaacaagaatatgatgcttcgttaaaaaataatacatgggagtttgttgttctacctgctaacagaaaagttgttgggtgcaagtgggttttcagggttaaagaaaatgttgatggttctgttgataaatttaaagccaggttcgttgccaagggcttccaccaagtgcaaggttttgattttcatgagactttctcacctgtaaccattagaattgttcgcactcttgctctttctcatgggtggttatttcaacttgatgtaaacaatgctttcctaaatggcttacttgaagaatctgtatacatgacacagccaccaggttttgaaaatgcagataaaaccttggtctacaagcttaacaaggcactttatgggttaaagcaagctccaaggcagtggtttgacagattaaagttcactctacttcagtttgggttcatagggagcaaatgtgactcttccctttatatttacacccatcagtcacacactgtttatctactggtttatgcagatgatattataataactggaagctccaatgtcctaattcagcagctcaccactagacttaatcatgtgttttcactcaagcagcttgggcatttggattatttcttgggtattgaggttaagcatctgtccaacagctccattctcatgacccaaagcaaatacattcgggatttgctgcataaaaccaacatggcaaaagctcgctccatctcttctcccatggtttctaactgtaagctatctaaacatggtgctgatatatttcctgatcttactctcattagaccagaaatcaattttgcagtaaacaaggttttgccaatttatggctgctcctcttgagtctcattgggcagcagttaagaggattttaaggtatcttaagggaactgagggtcatgggcttctgttcaggtctgctgatatcactcaacctctagttcttcatgccttttgttttttttttttttttttttatcagcaaagataatatgtatatatatatatgataaagagtaaacatagtacaagtagtaccattacaaaaaaacatctatagtcccgaaccaacctatggcagcctaatacatgaaagtacatggattaagatgccaaaagtcggggtggactttgcgttgccccaaaaaacaggggaatctaagtactataccccccccaccaacaaaagcctctctcatgttactagaccagaaatgaaaggatttgtcgaatccaagctccccattcttgatccatgaccagcaagagaacaaagcagatcccatcactttaacaggattaaagctttcattgtggaaaacaattctgtttctatgcctccaaatgttccaagtcaaggccagccaccataatgaccatatatgggaagtgagccctattttctgaaagaaaccaaattgtgtgaaatgcagtctcggaatctcagagaatgcccccaagatgtttgcccacctcatagattcccaccaaagcaccttgattcggtgacagccgaaaaataagtgtgctccctcctcgtcgctgttcctgcagaatggacagagggtgtcgttgagtactatgcttcttctctgtaggttcatctttgtaggaagcctatccttgaacaatctccaggcaaagcaatgagctttgctgggagcttttaatttccacatgtctatgagagtttcatcttgctccactgctattccagcccacttgagatacctgtatgcgcttcttactgaaaaatgtccatttgggtcaggctgccagttccacgtatcttgctgatgaacttgcagattgtgctcctgtatgtcttgtagaaactgaatagccgattcaacctccccttccataagaggtcttctccacctaagatgccattcccaacctgaaactgttgcgcatcccatttgctgaatgcagttctgttgttgattggatataaggtatagtctaggatatttgtccttaagtggtacaccctcattcctccaactatcctcccagaatagtgcctttgacccgcagcccaccctccaggatatcccacccatcagcccgttcgctaccccattcccacggcatgctacgctaagatctctccaccaaattgactccctccctaatcgcccatggcctaccagtttcctccaccctccgtatttcgattgtagtaccttaacccacaaattatcatgttggtgaaacatattccatagccacttaccatgtagggcgtggttgaatgaggttaaatctgagatgcccaaaccaccacactcccttgcttggcacaccaaatcccattttacccaagccacctttttttgatcagcgttcccaccccacagaaatctcttttggatcctctccaatctagctatgaccttctttggagccctgaaaaaagaaaacatgaaaatagggatggaatttaaaactgatttaatgagtgtgaccctgcccccaaaggatagatatttgtgtttccaggctgctaatttcctctcacacttcctaactagatcatcccatgtctcatatcgtcttggattagccccgattggaattcccaaataggagaagggtagagtcataacgctgcaatttaggaaagaagcagcactgtttgtccatgctggatccatgccaaaagttgcaaatttgctcttagcaaagttgattttcagccccgacacaagctcaaagcatctcaacatgaccttgattgttttgacattttctggcgtagcttccccaaaaaaaatggtgtcatcagcatattgtagaatgctgatatcaatctgattgtttcccactttgtaaccagcatacacgttcttgcgttgtgcttctcgcatcaacccagtgagaccctcagcaactatgttgaacagaaagggagctagaaggtctccttgtctaagaccacggtgcggagagaactcctccgttgggctcccgttgatcaacacagatacggacgcaattttcaggcaaccttcaatccacagaatccattttgagcagaatcccatcctcttgagcatatagaatagaaattcccagctaaccgaatcgtaagccttctcatagtcaactttaaatgtgaggcagcttctatttttccttcttgcttcatccacaacttcatttgcgatgagtacactatgcagcaaatgcctcccttctatgaatgcagattgtctatggtcaatgaggtgaggcaatacctttttcagtctgttagacagcaccttcgccagaattttataggtacacccaatgagggatattggcctataatcattcaagcctgtggatcctgccccttaggaatgagtgcaataaaagatgcattgccacccctcgggaatctgccatttacaaagaactcatccaaaaagcgaagaaaatctggtttgataacctcccaaaactcttttatgaatttgaagttgagcccgtctggccccgggctcttctcattgccacatgcccatactgcatctctaacctcccctgcttcaaaccttgctaccagagcctcgttatgatgttgctcaatggtcctgaataccacaccatccagcttaggcctgtcctgatacggctcctcaaatctgcttttgaaaaaggagacagcatgttctttaaccctattaggttcctctgtccagcaaccattgaccataactcctctcagcatatttttcctgcgtttccaattgacaatcaaatgaaaaaaacgtgaattacagtccccttccttgagccatctgttccttgctttttgccttagtaaagaagcattggacatagcagccatccatagctcttcctgcaacagttttcttttctttgcctcttctgcagataagattctatcatttgtatcaatctctaatctgttgagctcctcctcaatgcgtttcagcttctgttgtatattgccaaaatgggatttattccactctttcaaattttgtttcagagctttgagcttttctttcaaagcaaaaccccccatccactaaacctgtttgatctccagctatcgctcaccactttcttgaacgatttgtcctgaaaccagcagtccaacaccctgaatggttttgggccccaatccacctgtgatgattttactagaataggacaatgatcggagaaatttctgtccaatatgtgctgagttgaatccggccatttgtccagccatgcagaggaaacaagagccctatccagtctgcttttggcggtcccgtttggcctataccaagtgaactttctaccaacacagggaatatcttcaatctccagctccgctatccactcgttaaattccctcaacaaaccaccatcctaagctctcgagcaaatccccaccctttcatatggtcttcttatattattaaaattgcccaatatgcaccatagtcctcccacatgtgcatttttcagttgtcgtagatcctcccatagtttcctttttaacggagcctcacaagatgaatacacattcacaatgacaattttagagccatctgtaacccatacaccttccaaaaggataaacccagcacctaggactgtagattgtagtttaaaggcctcctcactccatatacacagcattcccccagctctgttgtttgctggtaagaattcccagtgaacctctgaatccccccataatgcttggcaaatcttagcatcaatgctttctttttttgtctcctgcaggcacaccatatccaccttctccttaaccaccagttttctgattgcattccactttacccccccacccagccctcttatgttatatgatattagcttcattgattgtgctgactaatacccagcctcatggcctcaaccacgtctctttcttccaatattgatattgccttcatcatgtcagtctgattattgcatgttacaccaagtgatttagccaatatccattcactctctatatctgatctccacagctccttgaccaagttgccatcctcttctaacgagtcagaagaatccaagttcgatgtcctttccccccagcagcagagtcatttaatctgttgtgttgctccccacttggagacaagagtaatggtgggttagtgacatctcttcctatcaccggaagctgcccatcatcaaattcttggtttttatctacttttctattgggctcaggctgcttcttgcaccccctgcatctggagtataccctccatggaatactattttggtttctcagcaagttgggccatgttccttttggcccaattgtttgaatttgctgtcagccccccagctattttcgggtcccacaggagaggtcattttgacctgagcgacactttctccagcaagtatcatctgtttgctgcaagcctgtctatgtgggtcctttccatctttgtagctaaagggattttctgctcccaaatccccagccgtatcttttgtctctcccgaaagcatgatttgtccagcctgtggaacgtctgctccttgctccgttgctttttcctgtttcgtacccgcatcgtacttgagagtgacttctgcctgtgggctttgtccggtgtctgagctttttcgatggaccatcagtccaagcagatggctctgaccctcggttaataagcgcgagttgccgctggttccgtccgacgccgaaaccacctccctcgccggctgtgtcatcggagtttccgccacatagctggtctccggtgtatcttcttcaccgaacgtagtggagccctcctctgattgaaactcctcctccgatgaagagtatctctccctgaaacctctgcacaagttcgagcatgtctcttccgagatgtttatggtgtacgttgtcccgttaatgtgggccacaaccttgtgattgattgtgggcgaccatggtgttttcatcagcaccctttgccctgtcgagacggtgaatatcagtcgtgtcatcatctagctccaccacctcgcctattccagccactatggtgctaatatgttccttcttccaggcatgcagtgggattccccagcatacaacccataccagcctaaagcccgtcctaaggtttggactccatttctccaaagaattaaacaggtacccatcattgtcttttaccgccctcatcttttcctctgctttggcgtcgcttagccccatgaggaggaccatatcgtcgcccatatatttgggtttgatgtcctcatctccgtcccacagccactcttcttcgattcgatcgaacgccgatagcttgctcagtctgcctacccaaacctctcgacaccacttccattcctcctccggtatagatatctgcaccgtcgatatagatggtgtagctgttgcgagcgacctccgccatggttgcctgtatttgttcgttgtaaggacctgagcataggatggcttgcggttctgttgatgtcttttgacgcctgacgtacccgcatcgtcaacatccaccttctcttttcctttatttttgtctgcgttgttgtcctccatcacccttctctgaggcttctcattcctagccgtaacctcctgcttccttggtctgtcgtgtttaggaagattaacatggagtttaaggcctcccacaaccaagttgtccagcacaccttcgagcttgcgtatgtctctgacccctttaaaacgtacaaatccatatcttctgccacttttgttcctctgtttaggtatgaagatctcccgcacatcgccccattttttgaataccgaccacaactccctttccttcgtgtcatcaggaaaacgagtgaagtagaaagacgttacgtctgccgcatccctccagttcttcttattgtcaacccctctccttgttcccgctgctaacccttttccgacgagtttgagacatgaggtatcccagtttctgtcccaggtcttacctctgcgatttactctcacccacccagtggcaaaagaaccaaaagggtgttttttttaaaaatatttaccgataaggtgcgttttcaaaaatatttgcaaatctggtgcaggagggtacctatatttacaaatctggtgctgtgcaacatctgggcgtgttgtaacatgcctgatccaggcatgttgcagcagcaccagatttggtagataaggccccccgctccgcattacctgtcatatgatcaaaagcccctgaatcgagaatccaacgattactaccattaacatggaatgtcgtaccttgttgagcaacaggactagttgcttcagcaaattaaggcatcaccttctgaaattgctcatactcagccttggagatgaaatcatcatcagaattaggagaggcacgaaactcctcactcgtattattagaagagtccataagtcacctcaaaccaaaagaaggaaggccttttttaataaaaaaataggcttcagagttacagaacgataacaagaaaacttgctcttgataccatattagaatgtgggtttggacctaacgcaaccccaaaagctagctcaagggttgagggatgtccccacttatatactttatcttggtactatcttcagccgatgtgggacttgggtctttcccaatacactccctcacgcacagcacttttgtgcttggtgcatggataatatggtggatggcccaataatggatctaggataggctttgataccatattgtaatatgaatcttcttattcattcactcatattattcattccttcgtattgaaacccaaagggttcattatatataactaattctactactctagaatattccacaacttactctaatactctagaatattccacaactaattctaatactctagaatattccacaactaatttataatattctagaatattccacaccctataataaacagcaacttgatttcaggtcatgagtgattgttccttggttattccacttttcacaaacctacattctaagaaatactaactactaaaacaatataaactaacacgaatatttcttttcatgacaaaaaaacactaatcaagaagaaaatgaagataattacaataaaataagaatgatggaaccttctttacataaaaggaaaacatgaacattacataaaaaataaaaaataaaacatcaatgcaacatagttgtccaatccctcaacatatctgctagggagtctcttttcaaaagatcatgcgttatatatcaaatagaagtaaaatgactaattttatctcaaatcacttaatgtaggaaagaaatctcctaaaatgagttatgccccaaccatatgcaccaaggtgtagcaaagattgcatattttccactaaaattctcttcaattctagtaaagccattcaatcaccaaaaatttggctagagaacagccaacattcatcaaaactcaaaggtcaaagtatactcaactattctaacaaaacaacaacaacaaagcattatcccactatgtgaggtcagctacatggatcacatgacaccattctcccttttttgatgattttctccaacatcctttttggtctccctcttctccttttcccaagctaaaaatcatgcaatctactcttctaacaggcgcctcttgtggccctttttatacatgcccaagccaccttaaccgattactgtcatcatttcctcaatggtgccaatcttctatcatataatatcattctgtattatatcttttattgatgaccacacaaataagggggggaaataactagaagccaatcggtgatcaaaataaaagatcaacaataaaaccaacagaaaaccatgcagtagataaaataactttatagagataaaagaatttcaaacactatggtgcatgacacaaaatgtttgggcactagaaaaacagcaacgacatgtaccaaaggatgctcaaatattctaaataaaaaagaccagatttaaaaggagggaattagaagccaattggttatcaaagaggttaacaataaagccaaccaaaaagcaggcagtagtatagaaatttctaaattttttgtgtgtaaaccattggtgaggaatgcttggttttttgtgggtaaaccattgctagaatttcctttgggatatgagtaatagttacacatgcaaagagattgaaaagctctacatgttggcactttttgccttgatttgtgtttggttgcagtcctatcatccgatgacatctaccaagaatgattatttattctcctttcttttcatcttctctattctctagaaatattctttttagaaattagtaattgtagaaatatttgagtcaatgcaataaagaaaagcacctgaactagaagtgacaaaatgagagcaacatagaatcttctacagacacgaagtgtttgatcatcatagttagttgttgcactggaaatcccaagttgatttttttgttgattgtgcaatgatcttgtattatctcttgacttgtttgaagcacgtagtggtgcaccatgtgccatatacatcaagaatggttctgtcacacctactcgattgccaactgactgcatgcataacataactaattaataatacttgcaaatatgccatatttttttgtaggaaaaaaaagctattccctagataaattctggttaaactaatataaatcggatgaacttgaagcaagtctagtaacatcttttgccaaaaagcgaaaggaaattctgtttaacgaaaaccaacctggtcaagcggagacaatttcacaaaacgctcatagtacaattcccaatctggctcaacatcaacattgattggtgtcaccaagtaaactaaatgcaagtcagatgcaaggacaaatccttcccttgcccttgaaagatcggctaacacaatctaagaaatcaaaaacagtatgatgattatactacaaattacatacccatattttcaagtctccaatggacaatcaaaacacttgaaaatatattggaaaaatgaacattttttttttatgataattgtataaaagggatatatatatatatatatatatatatatatatatatatatatattagctatagttctaacctagtatttacacggaaatagtcctaccatcatcacaagaaataaaaatggtaacaaaaattaaagggatatattatatacacacgatacacatcaaatgtccaatcatcatatttttctcatgtcaaccccccccccccaaaaaaaatgcttttgaatgaatatctatcatatcattcccagcttgcaagaaagaccatgttttagaagtttaagatggataaggtaggagagaaaacaaagtgagatatgaactgaaatattatttactaaaataaaagttaatctcagtcagttacaagagaggtatatcttgaacaaaaataactaactaacagaaaactactaactgtctaactacctaggtgctgttagcaaaagctaacagactttaacacagagaaatacaaaattgtttttacagttttaaatacacattctaatatccccctcaaactcaaggggaatggttttcaggagaaacattcttcacaatgagtttgctccttagaaactcaaatcttgctgaggatagaggcttggtcagcacatcagcccactgatcaagggctggaatgtgtacaactgaaagttgtttggctagaagtttttccctgacaaagaaaacatcaatttccatatgctttgtgcggctatgaaaaacaggattatgagcaatggagacagcactttgattatcaccgaacataacaggagttgtgaaggaaacttgtaattctgttagaagagcatgaatccaagtcagttctgtggaagtttgagccaagctttggtattcagctttagtactggatttagctataactttttgcttgcgaaaccaccaagaaattaaatttaggccaagaaatatagcagatccagaagtggaccgtctgtcatctacatcagatgcccaatcagcatcacagaaagcatgaagaaccaatggctgagtgatgcaagcagactgaaacaaaagcccatgaaatatagtgcctttaagatatcttaaaatcctcttaactactgcccaatgagagtcaagaggggcaaccataaattggcaaactttgttgacaacaaaactgatttctggtctagtaatggtagcatactgcaatgcacccgctactgacctgaacagagtagggtcatgaaaaagatcagcaccatgtttggacagcttgcaattggagaccattggagaagaaatagagtgagcttcagccatattagtcttgtgcaacaaatcacggatatacttactttgagtcataacaatagactgattggataggtacttgatctcaagacctaagaaataatccaaatgcccaggttgcttgagggaaaaagcactgttcgatttagttgtaagctgttgagtcagtgtagtggaactcccagtaataataatatcatctacatacacagaagatatacaacatgcacttgatgcttgtaaatgaaaagagaagaatcacatttacttcctacaaaaccaaactgaagtaaagttgatttcgttctatcaaaccactgtcttagagcttgctttaaaccatatagagctttgttaagcttgcaaactacggacttattggctgcctcaaaaccaggaggttgtgtcatatacacagattcttcaagaagcccattaaggaaagcattattcccatcaagttgaaacaatgtccatccatgagagagagcaagagtaagaatgatccgaatagtaacaaatgtttcatgaaaatcaaaaccttgaacttgatgaaaacccttggctactaagctgaccttgtacttgttgatggtgccatcaacattctctttcactctaaacacccacttacaaccaatagcttttctattagatggtaaggaaactaaatcccaagttttattttgcgacaaagcattatactcttgttgcatagcagcaagccaatctgaacttgccaaggcctgtttcacagattttggctctaaatgaacaagaaacaatgaagggtgtaatctaggattatgaataccagatttggaccttgtttgcataggatgactgttaccaagatttgaattaggtgctggatcaggataagaggaggattcagtgacagcaacaacctccgaagagacatgaggaacagatatagaaccagaagcagtaactggttgagacacaggggaaggaacagcagggtgctgaacagatataggggaaaaaccaggaggaacagatggagacagagatggagaaatatgagaatgtagagatgtagacaacacaggaggtggagacagattaggagtcagactgaaatatgagtttaaatctttgacataactagtgcatgaaggaaataagtcagaataaggacacttcagctcattgaacagcacatccttagagatataaattctgccagatgaagacagacatttgtaacctttctgagaattagaataccctaagaacaaacactcttaagaccgaaaattaaatttgtgaccatgataaggctttagtagaggaaaacaggcacagccaaaggttttaagaaatttaaaatcagggtccttataaaacagagtggtgagaggtatagcaaagttaagagaggcagtaggaagcctattaattaggtaaacagctgtagtaaaggcataatcccaaaactgaagaggtaaagaagcatgatgcaacaaggtaagacctaagtccactatatgtctgtgttttctctcaaccacaccattttgatgatgagtgtgaggacaaatgagtctatgagagataccaaaggaggttaaaagggtagagaaaggtctgtattcacctccccaatcagattaaacactcttgattttagtattaatttgcaactcaaccaaagatttgaaggactggaaaacagaaacagtttcagctttggacttgataggaaataaccaagtgtacctagagaaagcatcaataaaagatacatagtatttatatccagcataagagggtagatgagagggtccccagcataagaggttagatgagagggtccccacatagacctgaaacaattttatttgatggagaattgttacaactattgagaacaagcttgattacatgactatttggatgccctaacctagcatgccaaaggctgactggactaggaaaagaaatagcagaattacaagaaatattataacttttatttaaaacagtgagcattttggacagactgtttcctaatgctgaaactgaagtagacaacagatgaggagagatgtgctggagcttgatattttgaaaatagtatagaccatcagctccaacagaaccttgaagcagaactttatttgtctcctgagatttcagtggacagaaatgaggatgaaattcaaagaaaacagaattatctttagcaaactgagttagcagatttctcgagattgaggacacatgcaacaaattttgtagtttaaaagtaaaaagactctcattaggagacataaaggaagaagaaccagcaccattgatactcaaaccttcaccattgcatatgaatatctggtcaggaccatcaaaatgattgaactgcttaatatgttgtcactcaccagtcacatgaaaacttgcaccagaatctggaatccaagtagtgctagctggatcaccaccaggagagtgagtattagtgagcatagcaccaggatgattattgggctaagcagcagatttagaatttggattagtccagttgtttgatgttcaagcagaccccaatgcgtaaggaataggctgaaaagtagtgggatcaaagaaagcaaggaaatcatgaggcttaaggctcatgtctgaacgaaaatggcacacatttgcagtgtggccatatttcagacaaatttggcactggaaattggcaaacctgccaccaccactacctctaccagaccccccaccactgcggccagaaccagaatcagaaaagttactacgaccatgatagagagcagaataggtggggacaagtgtataatagaaggaaagctgttagtgagaaataagaattagttaactaactgaataaactgtcaattagttactaaagctgagagatataagtagagaataggagggaagaggggttaggcatgtaaacagtaggaggtggtgtacctcgaatacactgaatattgtaaccgtgagttctatgcaataatattcactctattcattttcgtcctctttgaattctgttttctctggtccagttctatcaactggtatcagagctccagattctggggcttggggggtgaatgggttcgaagggcaacaacaaaatggaagcacgaattgatgccatggagaaggcgatggaagatacgcgagagatgttggagtcgcgatttgggtcgatggaggctatggtgcagcgattggcgatgttgatggagaaattgtcaagggggcacgacgcgcgggagggagaagccagcaaggtcatgaggcggaacgagagtgtaagccgaccgcactggaaaaaggtggagatgccggcgtttggaggagacgacgtgtatgggtggctagctcgaatcgagcggtacttccgactacagggagtggacgacgtggagcgaatggaggtggtgctcgtcgcgttagagggagaagcgctaggttggtttcaatggtgggaacagcggaattcgaaccaatcttgggaaggattcgtggctgcgatcacccagaggttccatggaggtatggttggtaatcctttccagaatcttttagctttgaaacaagatgaaactgtgcaagaattcgtaagtcagtttgaaaggatggtgggtaccataaaaggactggatgaagaaatgttggtggagatttttttaaaaggcctgaaagaagagataagtgcagaggtcaggttgcacaatccaagaaatttaatgcacgatccaagaaatttaatggaggttatagggaaagctagacaggtggaagaaaaaataagagtgttggccaaactgccaagaaacagtggaagaggggtaattgggcaaaaacctagtttttgggggcaaaggaattggaaggaggggcccaatataaggggaaaaggagttgagggtggtgtagccaataaaaatagcaatgaagggtggaagggaaaaagaaatttccacaagttgtctcccatggaggtaaatgaaaaaatgaggaagggagaatgtttcacttgtgaggagaaaataccatcctacccacatatgtaaaaacaagcagttaagagtgatgataatggaggaagaagaggaggaagaggagttacatgaagaagagaaagtagaaaaagaagagctgtatcaactaggtttacatagtattgaggggttcaccactaaaagatctttcaaactatggggtcagctgaaagagaaaagggtggtgatattaatagattgtgcggctactcacaattttatttcatcacagctggtgaaggagttgaaattggaggtgactgcaactaatccatattcagtagaggtgggggatgggcataaggtgagatgtcaaggaatgtgtaaaggcttagtgattaagctaccaggattggatataactcaagattgttatctgtttgagttgggaggggcagatttggttttaggagtagaatggctggctagtttgggagagctgcgagctaactttgagaaattagtgttgacagttaaggtaggagacaaggaaataaatctgaaggctgaaccagaattaatcagggctgccattagtatgaaagctatgcagggagtactgctgcaggaagatcaaggatttttggtagaattgaaagcagtggaggtcaataaaggtggcagacaagttcctgttgatataagggaacaattggagcaattcaatgaggttttccagacacctcaccatttaccacctcataggagtaaagatcactgcattaacatacagcctgggaataagataccaaatttgagaccatataagtatccctattatcagaaagatgagatagagaagttggtgagagatatgttagcagcagggattattaggacaagtattagtccttatgctagccctgtgatattggtgaagaaaaaagatggaagctggagattttgagttaattatagaatgttgaataaaatcactgtacctgataggttccctatgcctataatagaagaattgttggatgaaattgggggagctgagtggttttcaaagcctgaccttagggctggttatcaccaaataaggatgaaagaagaagatgtgcagaaaacagcttttaggactcatgagggacattatgagttcttggtcatgccttttgggctaacaaatgcacctgctactttccaagcccttatgaatgaggtaatgagaccattcttaaggcaatttgtacttgtattttttgatgacattctcatatatagtgagactttggaggctcatgttatgcatgttaaagcagtgttgcaagttttacagcagcagaagttatatgtaaatagaaaaaaatgcagttttggacaaaggtcattggaatatttggggcatatcatctctagtagaggggttgaggctgataaaaacaagttagaagcaatgactcagtggcctaaacctaaggatgttaaagggctgaagggttttctagggctgactggttattatagaaggtttgtgaaaaattatgggagaatagctcaaccattaaatgctttgttaaagaagaatgctttcaagtggggagaggaagctgatattgcatttgaacagttaaaaacagctatgaaggatctgcctattctaaaggttccagatttctctaaagtttttgtgttagagacagatgcttctggaactggattgggtgcagtgttatcacaagaaggaaagcctctggctttttggagcaaagctttgacaggtaggggccagctcaagtcagtctatgaaagggaattgatggctgtagtgttagctgtcaagaagtggaagcactatttgctggggaaaaaatttatcattaaaacagatcagaaaagtttcacatttctgaatgagcagaagctgttgaatgaagatcagtttaaatggaccaccaagctgattggatatgaattcgacattcaatacagacctggaagagagaatgtggtagctgatgcactttcaaggcagtttgctttcactgctatttcagtagtgcaacaagaagattgggaagattgggagaaggagctacaaaatgatcagcaagtgtttgaaatatacaaaggcttgttaactaaatcaatggagaaagcaggatatgaaataaaaggaggaaaattatattacaaggacagattggttctggcaaggaattcaaccagaattcctgtaatattgaaagagctgcatgattcacctgttgaaggacattctgggttttttaggacattaaagagagttgctggtgtagtgttttggcatggtatgaagaaagatgtcaggcaatatgtggctgagtgtgaaatatgtcagaggaataagtcaagtactttatctccagcagggttattacagcctttgcctatttcctctacagtctggacagatatatctttagatttcattggtgggttaccgaaagcaaaaggcaaagacactattttagtagtagtagacagattgacaaaatatgtccattttgtagcactgtctcatccttttactgctaaagagattgctgatgtttttataaaggaagtagttagactgcatgggtttccaaagtcgatagtttcagacagagatagcctgttcatgagtcagttttggaaagagctgtttaagcaaacaggcacacagctaaagatgagttctgcataccatcctcaatctgatggacaaacagaggtggttaacaggtgcctggaggtgtatttaagatgtttaactggtactaagccaaaacagtggcctgacatgttagcttgggcagagttttggtttaacactaattacaacatatccacaaaaatgtctccttttacaactctgtatggacaggaacctccactgttgttgaaaggtacagatttaccttctaagatagaagagattaataaattgacaaaagacagagatgagctgattcaggaactgaagatgaatttggtaaaagctcaagaacaaatgaagaagtatgctgataaacatagaagggaagtagaatttcaagaaggagattgggtgtttttgaaattgcagccatatagaatgaagtccttggcaaagaagccaaatgagaaattaagcccaaggttctatggtccttataaggtggtacagaaaataggagaagtagcttataagctagagctaccagaagatagcagaatacatcttgtattccatgtgtctttgctgaagaaagctattaagccaacttctgtggttcagccattaccaagtgttttgaatgagaattgggaactacaagtacaagcagagcagatcatgaaaacaagaataacagcaggagggaagcaggaagtgctcattaaatgggaagggcttccacaccatgaagatagctgggaaagttgggaagagatcagccgcatttttcctcacttggaccttggggacaaggtccatcttgaaggggagggtattgatagagagcagaataggtggggacaagtgtataatagaaggaaagctgttagtgagaaataagaattagttaactaactgaataaactgtcagttagttactaaagctgagagatataagtagagaataggagggaagaggggttaggcatgtaaacagtaggaggtggtgtacctcgaatacattgaatattgtaaccgtgagttctatgcaataatattcactctattcattttcgtcctccttgaattctgttttctctggtccagttctatcagaccaccaccatttcaactataggcacctcttgagccagcagaatcactatatttgtaggaattaggatgagaatagccttgggtgtaattcaatgagggagaactcagcacctgagtctctttgttgtaatgattgaggcatgtctcatgaccataaagcaaggcctctatttcaacaatagaaggagttcttttcttaccttcaataactaaaataagagaagcattatcaaagggaagcccttcaagtagagcatcaacatactcctcatgtctgactggtaatccaactccagcaagctcatcaacatatccttttatttttctcaagtaatcctcaatggttttaccttcaagagtgactgaaggcattgaagtgcgtaactgacaagcacgggacttggtgtgaaggctgaaatgttcatgaattttctcccaaacttggtaagaatgatttgaaccaagaactcttgatagaacagacttggaaagagttgactgaagccaaaccaggagtgtttgatcttgaacctcccaagtttcatattcaggattaaccctatcagccactcgatcatcttctgtgaggtacctagggggaactacaggatttacaacaaatcgctgcagcctatgggatttaagaactagttcaacatcttgacgccagtgaaggtagttggaatcatctaatttctcagctatggagttcagaaataactgtgaaaccacattcatagaagcggaagccatggattaactgacagcgagtttgaagtagcacaaatgaacacccagaacagaacagcaagccagacacgagccaaacacgcgccagaagttgaacccaacacaaaacaggaacttgaatcgaacagaagcaccagaaataaaccacgaaagatgatttcaagatgaaatcgaacttcaaacaccaccagcaatcgcgaaacaaaaaacacgaaccaaaaccgaaacaatatcgtgaacaggaacacaatttcttgaacagatgaacagtacgaacccaagatcactaactaaatacaagccagctatggttatcttgcaattagcagtcatatgaaagaaatggactgtgcttttgccattttggttttctgaagtaatctctgatatatttgctttgagttagtagaagagacccatcagccactgatttgatttctatgccaagaaaataatcaagttttcccaattgtttaagagaaaaattggaatgaagcttgttggtgagttgctgaaccataacattggaggtaccagtaataatatcatctgcataaacaaggatgtagatgatgtgtcctttgtctttataaacaaacaaagaagggtcacatttaccagctgcaaacccaagctataaaagagttccttttagcctgccaaaccactgtcttgaggactgtttaagaccatacaaagatttatttagcttgcaaaccaaggttttatctgaactttcaaagccttgtggctgctgcatgtagatagtctcttcaagatagccatttaagaaggcattgttgacatctagctggaacaaattccatttattagtgagagcaagagtgataatcaacctaattgtgataggttttatcacaggagaaaaagtgttaggatccaattgtaagatatgggacctggagtcccacattagaagtatcggattctagtgtggggtttataaggccttgggctctccagctacaacagctagcttttgtggtgtgattctctcaaggtttttatcagaatattttggaagaaactagattgctgaatgctaagcttgttgacacacatatggtttctacttccaaacttttaccaaatcagggggagccactttcagatatagagaaatacaggcgattgattaggaagctaaattttatcaccaccacccaaccaaatatctcctttgtaagtggagtgggtcatctgcttaactctccctgtgtagtacatagggatgttgtcatccatattctataaaaaaatcaaaggagctccaggagaaggtctcttgtttgaagaccaatgttatcaatggtggaatataaccgaagcccaaaattccaccatataaacacaccatgctgccatagtgggctgcccttcacaaattgcctatggcagttggccaaaaatctgtcttgccattccaccatggtggccatggcaccaccatttagcaaaattgatgaagacaaaggtcatactcgagttgtaggatatgcgaatgtagattggttaagctctcttgtttgatatgagatccatctttgtatattgtattagtaacttgatatcctggagaagaaacataatgttgttgcaaagtccattgtagaagtggagaactgaaacatgactttaagcacttgtgaacatatttggctcaaacaagtgttcaaagaactacagtttggggagacagcatagatgacatttttttgcactgatagtgcatcaatctctctgttcacaaatcgcgtaccttccgtgatctcgtccttgttcatctgttcgaaaattacgtttgggttcttgctgttcattcgttcaagaaatcgcgttccttgtcaactgtcaaggactgaaacaaacataatgaaggtgcctaagattgcctcaatgtagatggctactatggctgtgatgtaggcaagctaaagattttcacaaagaagcagactcccaaatcaaaaggtccgataccaacttgaaaatatataagaaaaatgaatattttattttcatgataatgataattgtgagagagcacatttatatactagttttaacctagtaattacagggaaataatcctatcattataattacaggaaataaaaaaaaattatacggaactattctgtacacgcaataaacatgccaaatatccaaacagcacatttttcacatgtctaatatattcaaacaaaaaaaaaaaaataggaaaagccagactgcaataaacccagagtggattaagaaggggggaaaagcaatggcactaaataaacatggagagagagaaacttacaagtgactcttctggacaaagagaactgccaaaagatgcacgtccaagaggtgtggtactgtagagtttagtgtcttcattccattcaagaaattttctttggcacaaccatcgaagggattcttgtgcagatttcaccacgtctagaaatggttttgtagaatttaaaagggtacatctaacataccggttaatatcgctagcagtttgaacaattcctccagccactacttctaagattgcatgggtcattccattcatgtcttctgataaacaggaatgtaatggaggacagctttcattaagcagtcccgaaaccttttttagttcttctggtttacagataagtatctgtgtaagtcaaaaaacaaaaaaccactcaactcagacctaattaattaaaacaacacagcagccaatgagacatagatatgcccaaataaactatgatatcaatgtaaaaaaagaaaaatgagggaaagagagaaaaaaacatatgttaagtcaacaacaagagaattcaaaacaaaaaaaaaaaaaaacaaaaagaaagagtaacacgtatgcttatgcttagtaacacttagtagcctggaaaaatcacatagacactaccatataatagttaaaagcataacaaaaaaaaagtcatacactttctccttttgtatcaattccagttcgaccagcacgaccagccatctgtttgtacctcgtcccatctagaaaatcacaaccaattctaggttggcggaaaattaccctcctagctggcagatttacaccagctgctaaggttgatgtggcagttaagacacgtaaaaggcccttccgataacaagtttcaacaatctctcgttcctcaacctatgaaacagcaaaaaatggcttaggccttgaaggttggttaaatgaaaataactttttcattatctacataaactggaatcaaatatcaacttctgctacccaaaaaaagcatgcaataacagttctagtggaagccatgacataaaaaagaaagaatggaagattaccgtaaggccggcatggtgaaatgcaacaccagaaggaagagtttcctctaatatggggtccaacccagcagggcactttcccaaggagttaatagcagaagtaatatcagcaaactcacaatcattagcatcaacagtaaagcttttaaggaactttgcaatgtgccttgcagttgattcacaacccttccggctagagcaaaatattaaaactgagtgtccctcttgaacaacctgaaaagaatatcaattgttcataattattcagttttcagtattacaatgtttagaagttgcagttaagactctagaccaccaacctcattacatagttcaacaacatgatccggatctttaccaccaagttcagccgcttttgagattattctacaaagttccatacttttgttgtaaatggaattaccaacttttatatattcttctagaggaactggccggaactcggtctggtatagtgctgccttgatgcaaatttgagacagatttataagataatatcaaaaaaagaagtattcatacaaatgtgacgtcaagtatgccagcaataaatagtcatcattttttttctgtcttctgttcgttcttccttcacacatacaggtctgtttctcttccttcataattcactatacagactttcctaattttaaatttgaagttttcttattttaatttcaccatcatctttcattttgacttcattcccatgttcttattttagagtatgacctgtttattatgaatttctttaattttgtctattttgggtaaaaaatatatttttaagtatttatttagtttttattataatatctgaaatagtggtcatcctgctatctgctatcctactatagtgttctcagagcaggccactatccagggttgatcattatgtgatttcacattttagcactttcctatatcttctctttcttctatttcatcaataatcctaaataaatcactaatgtcactaaatttggttttctgctaccaatgggtgttcaggtgatacatgcttgattcctcttatgcaaggtttttgagccttgagtatgaaaaaaacaaaaacagcagagagctagcctcacgtgctgaggatgttcccaactcaaacaagattgcctccctatggaggaaaactgtggtcctacaccaaaaaaaaatgattttctagtaaaaattatagacggatggttcaattaatatttgcaaaatcttatttcctctatttccagttactgttcaattgcttgtagcatttctttctttcaaatgtataattcagagtaccaaacatgctgtagctaacatagcaaaattaggaggaattaggtcttttaaagaataaatatcaatttatataaagttatgctgatcaagtttaaacaaattaactcaattatacaaccaaaagtcacaacaaaacacgacagttggccaagagaaagaggaagcccaacaattgctctatatgttcatgagggtgcggtgcttgtgattatgcttacttgaagccagtcagcaactgctgcaacatttggcattgttgcactcattccgacaatttgcagaccttgggcaggatcagccttatcactgcttccacctgaactttctccatcacttgattttggaataccttcccctgatgcataacgaagctttgtcaacataagttcaagtagataacctcttcttggatcaccaacctgttaacagatgtagacaacaataaaccatgagaaccatccaagtgtaccatttgctgttcagctttcataatagtccgatagaaaaatacaggggaaagtagcatgtaatagagctcatgacataaagagtaatgattgatgataccatatgcagttcatcaattacgataattcccatttctgatagacgcccctcttccaataatctattaactagtgagtttgccttctctatagtgcagacagctacagaagtatctttaggaagtgttccaccaccttggtttccataataactacgaacatgtttaccaagtggctcaaggagacgttcaaggtgttctgcctacatgaatccaaatgaaaacacaacaagtaaattcaaaattttgaaatattttaaaactgaatgcctcaaacaaaatccacaagaccatagccagaaatgtaatttctaaatttaaggggcaagaaaagagaaccttttctgcacaaattgatacatatggaagaacaagtaatgccatttttccagttattatcaccctccgcagcattaaaatctcagcaacaaaactcttaccagcactgtggcaacaagaaaaacatttaatacatgccttcctcaaataaaagacagaggtatcacgagaaggacagagtaaaaacagaaagtgaaataaaatatcaaaggaaaacaaaaaagagacaagagaatcacgtcatgtcaagaactgaaaacataatggagaacatgcaccagaattacaaagaaacagcataaagaattcagcaatcaatgcaagagaaaaaattataaaatcatgtatggattcaataagatgagacgttcagtacagaaaaagaaacatgaaatgaaacaatgacgttgtatatcaataaattaatggtcattaccaaaattgagactctagcattctatataaaagaaatctatcatgcacttttccacctcgtttgaacagaaaccataaaaccatcccctcccaaaattatatattccaccccacctaattccataacttttaaataaatgaataggacaaaaacataacataaggtttacattaattgctattttgagagagaataaataccttgtagatgcacaatatacaagatttcttctctgtaggacaccatccactcgaaggcaatcaacctaaaaaatggaaaataaataaaaagccttattaaacttacatatgccagaaacaataagattttaaaataaaccattttaaagaaacttctcagtagatacattaaactccggaaagccacaacttttgaaaagaaattaagataaaacaactagtagaagaaaaaaaacaaagtagcagccatgattaacagaaggaattcatttatttagatggtaaagcactacaaagaagtgatgacatgagaagaatcttcatataaaatgtgtacctgccaactgtaaagccttgagattcctttctttccatatatgctgcatatttcaggaggaagccagctgtttaggtcaaaatgatcattaagtgatacactagttgaaggagtactggcttcatcagatgcatgtgcactaatcgatgtcctgacctcattgtggggtgaattagatgtcatactaacattatcctgacaaaaccttttgcctaatgtatctactaaagtattctcttgcacttcattcatcttttcatatgtatgacctatcatagaacatgaatcatactgtttaccagccacacaactaacattgattgaagcaccaacacggcagttttgcaaggtattttcttccaaattgttgtcctcaaacgaaaaatcaaaatgtttaacaggaaggctggatgcttctttcacagaatcttttgtgtgcatcccaactaaccctaaaggagcacccatttccctattccggattctgtttttactttgatccaatattttccttggtttgccatcgtaattttgtaaattgcatgagttcttcatctcaggttcctcttccaccacattactttctcccataaccttagaaggatcattacccatgggaacacacaaaccatcagcaagttgaattgcctcattccaaaatgcctctccaggcgaaaatgatgagctgccacgtgttgactttggagtctccctaacacctgctttaacaatcaaagaccccggtgtgtagtattcagccaatttcattgatggtttaggtgtgttattacatttcctaaagcctgtctcaaagccagtagtatcaccaccaccaccagaaacctgtctctcagaagccaaagcatcaaaacaaataaaacatataccctaaatcaatcaaaatatcaatctagctataaaaaaaatccaaagtgacgagtttgagcttaaccttcatacaagagccaggaacacatcccatactattattattaccaacaccagacttgatgtcttcatcgatcttcagaatcgacaatgtattttcaccaccaaaacatagctcactggcagtgtcattattcttccccagtaaaacactatttccccctactaatgttggtgaaccatgtctcttgtgatcatccactttcatatcggacggcaaacccacactcggatgcaatacactgcaagtagcataattcaaaagctaataaacaaacacatacacaagtaaaacaacacaaaagagaactaaaaccacgaagtaccaacaccagtcctccatgaactaaagtggaggtacccaccaatctctattcatttttttcaaacagatagagtaaactacctgcaattcaaagacaaaaagtcagcagcaaactgtttcttctccaatttcgccacaccctgtccaagtgaaatttcacttggctgaatagattgagaatctccacacccttgacccaatgaaacagtatgcttattaagctcattgtcaagagaaccaccaatctccgatgtcaagtttctcttaaccttaacagtgtttgtgtcgccccggccatcaccaccaccgtcctgtgacgaaaccaagtaaccatccaaagtgcctttggcactcggagacgcatcagccccatgcctcgcacctttttcgaatctcccagctttaggaacaggcgacgcagctttcctcttcttcgaaacgtaaaactgcccacataaatccaataacaaacaaacgcaagcgaaaaaatcaatattagtaaaattaaatcataattcgtaaaccacagttaagcagcaaagttcaaaaattgtttaattcaatttttttgtatgttttgattttgatatgagaggaaggtaatgcggaacgaaacggcgttgtgtagggttggggaaacggaaacgaagaaggagaaggacctgatcgattcgagagcgatgcgaaggagaagccatgtgaagaacgagaaggttgggttgtgttgtgttgcgttgttgttgtttttctacttcttcgccttgcgctaaccatgagaatgataatgcatcatacgacgtcgcataatgcgttgctttgatgcttcgcgagcgccgagtggaagagacacgacgaaccgagcggtttgtgctctttggagtggcgctctcactgaaagttgcaaattgaaattgaaattttcgggggagtgggctgtgtttgtcttccgggtaatgttatacctacaaccggaataggaaaaatggaaaatactaacgtttataccaaaatgagaaatattaagttgtttggtttgataaaatattttttatttttatttcttgtttttattttttgaaaaaaaattcattttcaaattttaaagtttaaaaatatgtttggtttaattttttattttctgttttcagaaatgtgtttggtttaactattttcaataaaatttcatgaaatgattttagtataaagttaataaataaattttaaaaatataatatgtttcctgaataagaattattaaaataattatactatttattttaaaaaataaacataaaaattaatatcaaatcttaagtctcacaaacaaaacaaatctatacataaatcatgactaagtctgacaaaatagaaatcaaatcaattttttcatgacctataataattttccacatttgatttgcaatagtttctcgaacttgtctcattttagcaacttggttggcatccatattaacaccttcttggtctacacttaaatcttgttcgtctgtaattaactcttatttgtcatattgattaaaaagtgtatatatgctctgttgcagtatgataaaattatgtatagtgcaacaagcaatacggatcagtttttgtcttctaacaagataatttggcatcattggaaaccttgcttttagtattccaaaacatctttcaatggtgttccttaacctctgtctacgaaatggggcaagataaccaggaatatttggcaatccaaagacaacaagataaaattggtttgtaaaataaagaatgcatttattcaataactcttcaaggttaaataaagaaaatttaatattaaaaaattcctccaaagggttttggaaaattattttaagaatttaaagcatccataaacactcttgcatcatttgttgtcccttccctgccaaaataaacaaatgtgaataacataccaaatcgcatattgccaacacattttgtgttaccaagatttttcttccgcaaaaagcaatgtgtttagatgcaagtacctaagataaaacaagtgtaccataatggcaccaatacaattttgcataaacataaataagaattagtataaaaagaaagaaaaatgttaaatattttaaatataagaatagaaaatactttaggtttctttcaatataaggatgtggagttgtccaacttctttggcaaatttacctttatcttttagttattagttgattttttctcaattgagtgatcgttctaatgtaatgaagtcttctaatgataaagtcttctcataactatcacatattctctaaaaaatttctttatttcaaaatattcaaatacattttaaaaaaaaataactaaatatatttagataaaattggatattcacacctatgtataattctcaaattaattaaattcttagtaattttcaaagctaatttctacaactctttttaattattttaatttatcacaaacttaagtgcaataaattatttaaactaagaatcaataacaataacagagtaaaaataaaacattatttattttatttttttcaattaaagaaaatttttaaaaagtagaggattttatacatataacttcaacaaggcaaaagaacctaaataatattttttttttatatttaccaaaatggggcgctttccaaaatatttacaaaaatggggcactgtaacatgcctggattaggcatgttacaacgcgccggcgtgttgtaacatgcctaatccagacatgttacagtgaccccatttctataaatatgccccccaccattttctcactttccactatctctctagaagtgctctaccttctctctagagtttttcggtggatattttgtgcagcgaagctctgctgaattgtgaagttttccagaaacaatcctgcgaacaagtaagtggatttaattttttgcctctgttataatatttttagtgatgttgttattatttagttatttatattgttaatgatgcatgtacttattttttagcaaaatagatgttaggttacttaataattgttttagtttagggtttaggatttatttattagaaaaatgttaggatgatgttaatttgttagtgacataaatttaggtagatagacaattgtttaggtatttggtactgtagtgtttggataaaatgattagaatttaaaatttagggtttgctgggcatggttaggttgtgtttagggtatactcatgtgacgatagtttgtggttaagggtttagggtttggtgggcatgagacatgacgtttgggttagggttggggtagggttgggtttcatggtcatgtgacgatggtgtgcggtttagggtttagggtttggttggccaggtatgtgacgtttgggctagggttggggtagggttggtgtcatggtttcggttgcatggattagggtttggttcagggtttggggtgcagtgattagggtttatggttttaggccgaaccgggtcaatgaccgaaccggttttcacaactacggttttaggttttggtttttgggtatagtgtttagaaatttgttgttttaatgattttgtgaattgtacataattgttaacatggatttttatttttggtgtatgaagttactgataacatggccgatttatctggatctgattcgccgcgctctgtatcagatcatgaggctgagccgatggatccaacatcttatgtggttcctacctcgtacagatagggcgctttgcataggcgtactcagcgcacccatgtttcacaagctgtgtggaacgagggcacaatacaactactaaagactcgacatggcaagttatcgggggggccagcatatgacaatattcctcaagtcatttctgatatgctgcgggacgctggctttcttcatgtcgcacacatgcgacatattcaggtatgcaacacctcatattagtaatcaaattttatttaacgataactatagttgtcaattgattaatgatattgttttagattgatgttgggctgattaatgatctggttgagcgatggaggccagagacccatgcgttccacatgccacatggagagatgactatcacgttacaagatgtggctggtattttgggattgcccacggctggcaatgtcgtcactggagtgactttgtccgattaggcggaggtcattgaggatgttttcggtcaagaacctgacgacgaaacagagctggccggtggatatctacgactggtttacttcgataggcattttggggattggagtgagttggataaagattttgtcaatgtgacgcggtttgcaaaggcgcacattgcccgccttattggtgcatggctgttcagcgatcgatctggaggtagcatgatggcagcacgctatatccctttgttggctggggatttcccagagatcgggggatacaactgggcctctacggtccttgcacatttgtttagacagatgtgcgagtgtgcagatgcatccagaaaggacattggtggataccatatgctgcttcaggcatgggcgtagctgagattcccaccaattgctccatgtattccgtagcctacggaccgacattcgcattttggataccggtatgtgtcactatatgttcattttataacaattttaacaattaagccctacattgtttaatgttagttattttgttaacaagtttaacgggctaccccggcttagcccgcacaaggtggtctgtaacgcctctctttgctctctcgtgtttgattgattttaattaaaaacttgtgtccactttgtgttaaaattagattagtataaatttttcacgaaatttcttttcgcattgcttgctaattttaatagttgtcagtaacataaacgatattccttccctcgttttatgcaaataaaattcattaatacatattgatttattaacagtccaagtacagtccaactagttttgtacagacagcgtattacaacacggcgtggcaccaaatacagataaacagaaaatcacaagcacagcataaagtacatccagcttctttgtctacagcttatgctatcctgtttctctgctcgcccaaatgaattggggtcatcacaggtgtcaaccacagacacaactcgggtaagtattttaataaacataattagataatcaataggaaacagaatagtatatcaggtacataatagatttaaattaaacaacggatatatgaggtatcataaataacatttatagaacaattatatgatgaatgatgcatggtttcttatttaaatgatgcatgactgagatctcagcttctcataaaatcaacatcagtggccacagtcagatagccccaatcactggtccagaacttgcatgatcagtcaggatgtcacagtggtgcacaggaaagtcacccacactacatgtgatcatcatgggtggcgtgagttccccactgccgaagcatcccccagctcagactcctcactgtctgaacgctcatactcagttcctctaactatctgacaaacaacttcacggtttaaccccccgcaaggcatcaactccacggattaacccccgcaaggcatatgcgtatgaaaatgcatgaatgatttattttatccagtctttaaacatcattacaactcatggcttttcacataaaacttttacaccttagtctcaatatacagccatgatttatcacaacatttggaatccataaataatcccaacatctttaataatacgaggattcctacctttataattttctcaacattaaaagcataacatcacccaacaacttgcctcgaaggatcacatacttattttatttctttgaaatctttcatcaaacacttgatgtgctttatggagcactcaacataacaaaacaacatacaacacattaactacagcaacatatatgtacagcaatttacgacaacatactaatgatatacaacaacagcatacaactttattggattaatttacagcaactaaggaatatatatataacagcatataacatacagcttctaacaaccttatatacagcaatatattaacatacagccccactaaattaacaacccaacgtcatcaaatacttaactatcaagaccacaaaattaatccttttaattaactattttcattctagacttaattaggtatccaaaacatagcatatagatttttaagttcattgaggacttttatcaaacacatggtatgcctaacttaaattttcataaaacaagcaagaacatggctttaatcaaaaagaatggaatcctaatcaaccatctaattcatgtttattaaaatactccccataccttggtttcctaagctttttggacagcccacctcctttgaatttgaagaattcttgctcctagagtggctagtcttcacgtggacttctaggattaggcttttgtgttttgtgttctaggtaaagggtattaagatgaaagaaaatgaacaagcttttgggtgtatggtgcacggcctaagctctcttagaactgcccatttctggtcctacacccctttttataggatggttaaagcttaaaatatcaaaggatgatgattactaactttccatgtggttagtttttcattggctagccattcttcatgttccaagtggcctttttcttgatttttctcaaggtttcttcattcttcttgatggtacacgtgccatagcttgcttggagagcaaattctaccaatttacgtggagtagccaagcttttaagggaatttcgtgctttcttcatttcttgaatcttccaaaacccattttactaaaatattgattctggattcattaaccgttggatcttcttaaagttttattggtatattcctaacttaaatatataggttttgaccgttgggatctttgaaataatgcttagaatttcctccgtgtctaaagaagtcaagaggaagttttcttcaataaaaatctccttaaaccattattacttcctttacacatgcttttcttttattggctaacaaatggcttgcttccaaatgcacatgttcttgagttttccactgcctacttgcttcttcatccatcctcatgtgccaatttaatttatatagtcaattccatgtagcttgattccatacggttggtgtttccattttctttattttctatgtcttaaatatcttttgtatgaaccaattagaatgagtttagacttttccacattccatgtaatcatgttttgacctttcctaaggcttttctcccttaatctatattttgcacggccaagtctcatttttaagaccaaacctacacaatttatccttttatgtcatgtataaatcaattctagtttcctattggtccattacactttttatttaaaattactaaactaatttgttaaagaagtctatttatcctataattaagagaaaattccatagattatgttcatctttttcttataatttttctgatatccgagttagtctaaattaagtttcttttcaaattaccttccaaaatttctagaaattctaatttagggttctttgcctccatccttgctgataacctgttatctaaaagtattttatcctatgctcaggttcctattaatttctaaggtcatcttggtcaattttgacctagggacattttggtaattttacccttcaccctaggggtataattgtcatttttaaaaatgttcagggaaactctgtatttgttaccctaagggtattctgatcatgtttcaagcatcccagagtatttgtaaagtttcctccttaagacatcttgctaaaatttctaagggcaatttggtcattttcaaaaatatccagggatatttgcgtcatttccctcaaatctttttatactgcctctgatcacattttaccctaatattttgaatacagaatatcaatccccttcaaaaatttggggtgttacatggtctactacaggatgaccttcgatgccctcactcgggataatgtatgtatagtgattgtttagtaattgtaagtttgcacttgtggtacatgtgattacataaaacaagctaacttttttttatgtgcaggttgtctgggaaccatatggggactacgatttcgttggtgcatctgaccatgagcgattgttgtggatggcatcaacgccgattatctgtttccacacagttgaagctttccagccggatagatgcatgcggcaatttgggagggataagccaatcccacgtcctgccatgaaacttaagggtgtgcacgacttttcactgcgtggtaaacaagaggaaaattgggttcgtaagctcagatcgtttatcaggcgctggcagcatagggaagagcacatcgacctccccccccaatccagggcttaatgtcaccaaactatgagtacatggtttggtacagggaaaatgggaagcggtttatcaccaaggagggtgccaaaatgggtcgtagtgtaagtttcgttttgatgaattttttttgttatttacattaattatcataattgacatagttgacactggtgtttatatatttgaatttgaatttataggtcaatgggatagagatgctctacttcgcgacacttaggcagaatagggcgacgttcgacttcgattgggctaatcaggagttgggtcgcctaatgtctgtcttcacacaaagttgttaggtggaggaggctggaccacaagctcccgagacgtagcttgagaaggagccataattgtctcttcaagttggtcgtcgcagaagagagggacgtggtctagatcgtcgacggttcagtaagtcctcagcccattgttggtcccggtcctgccgccctgggttgttataggcctccaattattgaatcgacatatgggagccaggtcttttatcatgatcctattgagcatattgggtcctactattacgaggatgttcctccaccgggagacacacagacgcagggccaatttgtagacgttggctttgggaatgtccccgctaattggacgcataccaacgtcgatcagatgctcatggagtttgatatggccacaacaggttgtgggggttgggcaacagatgcaccatatgtgcctgaacctgctaagcatcctatgccattatatgcagaccagggcactccatgtccacctccatatgtcccatcatatgaggcaggcccctctcaggcacacctggccgagccaggcagttcccaccgacctcgaagacggaggcaacctaatcgacaagcgtgtcgtcaacagtggccaccaccgtcttagttttagtcgcctgcttgtaccattcgtttgtaccatttattttaatgatgtgtattgtaactattatgtatgttacatttgtttgtgctatttattttttttaaatgatgcttagtgtaagtattagttagcttataattgtcgtggaatgcacgaattcatgtgaatcccatttttttatgcaaagaacagtaaagtcataggtctgaagtaaaaaacaaaacaaaatgttcatttgtaataagaacaataacgtaaaacaacatattcagcgcacatttctcattccatctgcatgtccggtttgctaaaaatggctaaaatttcaattggacaaaaacgtttctagtagttcgattctgctatgatcttcaacacgtcttcgtcgcttgtcaactcttttatgtgatattcgattgtgctagtcgaatattgtgcatggcgtggatgtcaaaaaaacaattttctcaccacctgtgacatgtgaatcccatcaagggggaatccaaccggcgcaacttccttgatgacaaccttcagtatttccatggtgcatgcagaaggaatttgaaattgtattgggtttgctccagtaaaggcataacccacacaaccggttcttcggggtatggtccactttccgttgtaatatagcatagcatcatgcgttggaacgattgtggattgaagtaggtttagtatgccatcgggtgttctgtggatggcatataaaatttcaattgggccagaactcgacatattgtcactgcaccttaacattctgcaaacatcatcatcatttgtgagtgccacagaagtaaaaaaatagtgctgacctgcatgcagagatggttgtcgatagtagatgttgtcaacaacatggtcatcacgaagaataagggtttgatgcatactactcttcagggtttgaaacgaacagtcatcaggaactcgcattggaattggagttgcacagcggaaagaaacccttgtttagtcgtgcttcgttgatccattcggataaatgaacgctaattttgaattaccaatgttctgactgctggtttctcctaagaatgtcatcgtatgcacattgaattttgagtgctgagcatgtgagttatatagggctcaatggcatccaacttgggcgtgttcagtcacgtccaagttgggtgtgttgaatgatggcctatttattaggcgtgttcagtcacgcccaagttgggtgtgttgaatgacgcctatttgttaggcgtgttctgtcacgccgaagttggacgtgttgaatgacgcccaacttgggcgtcttcaagacgtgtttagtcacgcccaagttcggcgtgttgaatgacgcccaacttaggcatcttcaatgacgaccaagttgtgcgtatcatgtcagaccttgtttgacagcgtgtagtgaacatattgttacatcaaatgcatacattatcagacaacaaaaaatcaaacatgattagtattaaaacgttataaagaaaaagttaatacaaaactaatataacataccgaacaacgttgtacattaacaaacaattaataaaaaaaacatacaaccactcagaaaatcatgaagtccccccacgactaggacaaactctccggttgtgcccaacttgcttacaaatgccaaacctcatacgtctctgggatgttttaacttcatccatatcgttacgtattctagtggaccttggacgacctttggcacgcagcattgatttgtcaggtatgatgattggaccttcaccaggtggaatggcccgttcattccctatcgactgccatggcactgaatatgcctgcaccaacatacttacaaggaatgtcgtccacgtactgaaaatgattttggcggacatgtaaagcagtagctgcggcatgactgcatgggtatttgaatgccttgaacttcccacactgacaaacccaatcggcaagggacactgaatatgacttgtcgcacccatcatccacctgaaataacgttcgagcaacgttatatctgcgtacatggtgccctgaagccaacgactgattacgcctcattgcttcaaccacatttttgcaatatcgttgtgaatgctgaagctgttcgacagccgcctcacctctgtctacaaaatactgaaccagtcgggtgtacgtgtgtttgacaagagttgtgataggcatgttcctggctcccttcaacaccctgttcactgattcaaccaagtttgttgtcatggggctgtatcttctcccctccacatcatatgcacgtgtctatttctccttggggatggaatcgatccattccgcaacctcaggactagtctcacgaaatcgcgcaaatgcgatgtcaaactcgaccatagagggtgtataacctgcaacatcaaaaaatacatcaacataattgtctttacaaatttttgtaaaccaaaagtatgataaatatcaatgtttttagtcacctaaattcatgagggccttcttcagtcttgcatccttgaatctttgattaaaattactgacaatgtgtcgcaggcaaaacacatgatgcacaaaaggtggttgccaaccaggatgactttgaacggcagatataatgctcctgtggcgatctgaaatgaggcatatattttgcatgtgagtaacgtggaagcgaatgttagaaaagaagtaattccaagcttccagcatctccccctcaacaatggcaaatgccaaagacacacattcattattcccatcctgagttgtggcaaccaacaattttcctttatacttgccatataaatgagtcccatcaacttgaatgatgggtttgcaatagttaaatgcctcacaacactgtccaaaagtccaaaaaatacgatgaaacacgtgctttgcccgtaccagtcgatttgcaacgaagtaatcattcgtctgaatatcaaaatatgaacctggtgcaaaacgaagcatgtagttacaccacctgggcaagaatgcataaggttctacccagtcccaataaaccattgccattgctttctgcttcgcataccaagcctttcgataagaaactttaaatccatatgtgttggtaatcctctccagaaccaatgagattgacactgatggttcctccttaatcattcctaaaaaaacaaaagtaacaatcacatcaataacatgctttgagaacaaataagttttctaaatgcataacagtgaattaaaacataccaacaaccagtgcagcaattacgtcagaatcaagctgcctgtgaccctgtgaaatatgatcatttaagcaattgtgttttccaccccattttgaaacaacccacttctcacggaaaactggtttaataaccctaaccctccaagggcaaccatcaatatgcgcaacacacttcatggaaaacttgtcaggcttgctctcaaccacagttgcttcttgatgctcattcatcaagttatgcttcactgctatttgcgcttcctttttcaagtcaaattcttgtttaacaaacaaaccatcccctagttgccacggaccctgcactgatcttcggagaatgccctctttctctttaaagaaccagaaccgctaaaagagtcttgttcgggtgggtaactccaatcaatatatgtataatgaggaattccttgccagaaaggaatcacctcagcagctgcacattcaacttcagtttaattaacgatatcaactaaaaagcactagcaacacaaattcttaccaacaaaatgaatcacttaacatttataagtatctatctaaaaagtaactaaaaagaaaaagccctaaaccccaaccaaaccctaaacaccatgtacgcctgcaaaccctaaacccaaatccctcacccgaatacccaaaccctaaaccccacacctcaacagaaagccctaaaccccaaccaaaccctaaacaccatgtacgcctacaaaccctaaaccctcacccctcacccaaatacccaaaccctaaaccccaaccaaaccccaaacctaaagaaaaagccctaaaccccaaccaaaccctccaaaccataaacaccatgtacgcctgcccacataaccctaacccatcatccaaatacccaaaccctaaaccccaaccaaaccctacacctcaacagaaagccataaaccccaaccaaaccctaaataccatgtacgcctacaaaccctaaaccctaacccctcacccgaatacctaatccctaaaccccaaccaaaccctacacctcaacagaaagccctaacccaatccaaaccctccataaccctgtactatcaatcctaaatcctaacccctacctatttaacccaaacaataaagcacaaacactttcgattaaacagcattcacctaaacaattttctatataaaacaaaattctaccatcctaattcatttagtcatccacgtaaaccctaacaaaataacatcatttaatgcacattcaaaaacatattaataaacaatataaaacaaattaaatgagaaatatgctacattctaattgacatcctcagctaatttaccttgttctggttgactagaaccactctccgcatgatcacgactttgagatgtcccgacattaacatcttcctaatgcaaaccagcatccttatcctcatccgacgcactagcatcctcctcaagaagccgatcttccattgcgatattttcatcatcgtcatccacttcatcgtcatccataacccaagttgggtcatgtgaatcctcctcagacacgtttacctctccaccaacaaatgatgctcctccaacagcatacgatgcccctccagcagcatatgatgatgtatggtgtggaactgcctggattggtaaaccaacatcctcaacttgtgtaatatccacgtacaactccaaaaaatctttccttgcctggttgcaaaattcatccagtaccaactccacgtcttcatcatccattatttgaaaccccatgaacttctcgtgttgccataatcttcccatcagtaaagtgatacattggttgctatttagacataatttttgccgtatcttttcatgcaattcactaagtgttgaggtacgcttcacaaaggttcctcgtgtttccccttcaaaaatgacaccctgttggacttgacattttcttccattacaatttaagataacgcgaatagaatcagcacttgaactcatgcttctcgtcactcaaaacaacttcaaaaatctctggaaaaaatgacaaaacactagaatagtaggtagtttagcaaagacacagaacactggaaggccaactatgagggacaaatggtggggggggcatatttatagaaatggggtcactgtaacatgtctaatccaggcatgttacagtgccccatttttgtaaatattttggaaagcgcccctttttggtaaatattttaaaaaaatattatttaggttcttttgcccttcaacaaagttatgttcacatccaatttattatttatgacctcattatcttttgaacaaagagaaaaaatatattcaaatttatgaggtttcatgttttgctatgctttctctataagataacgggttccatactttccccattggacaatgataagactattttcactcatcttatgcttatattttatgaggaaatatggtgccaaaaattttagaatattttaagtgattacactactaaaaaatgattttttacgacgcacattcgatgacgattcccaaaaaatcattgtatataaggcagtgataatttcataaatatgtgatttttcaacgaagacagttttacaaaaatcgtcttggaaactaccattctaagacgattttgtaaaaatcgtcttagaatggttgtcattccatgatggctttccaaaaaccatcttaaaaggctatcattctaagatgattttataaaaccgtcttagaagtttgtgtatttttaatttttatccacacattctaagacggtttcataaaaatcgtattagaagtttgtgtatttttaatttttatccacacattctaagacggtttcgtacaaatcatcttagaagtttgtgtatttttaatttttatgctagctctttatcttgaaagaaggtgctatgtttattattcttaatacaactattagccttaggaatcatggatttaattgacaacgttatgtataatatgcctatgacttagaaaatttttcccacaggaattcaacattgttttttcggattcgtttttccagtgatgtaagggtatgtgttttttaccggcttcttaatgtctcattctatttggtgatgccattataatttgtacattcttgtcattgtttaatttccttttgggaatatttggtaatttgctaatcttgcttagcttcacgagcctttagctacaatcaattaacaattagcaattaggattaaaatcattttttaaatgtatgttgatcgatacttctttttaaccttgtgaaatttcaaaaagatattaactaatagaacaggttcgtatgaaaaacccataaaaattagccacaacctatgatggattgataggatagtatccaacatattgatgtgattattctaaaaatataagagatacatgtctagctatttataaaaattcataagcttcaactttttaattcattgttaactagaatactcattcgagcaataggaacacgtacatacaaaatactataatctccaccttgttgaagatctaatacatgttccacacatttcttgtttataactccttccaggtcatgatggtgctcgtgctactgagtatgtcaagtaaaacctatttaatactttcattagtcaccaaaaattcatttctgacaccaaatcagcaataagtatgttgtctctcgcctgtcacttccaggtccttatgtctgatgttctctgatttgctaaatccaaagaataactttttttcctaccaaaattttatttccacagctgatgcatacaatcatactaactttgagttgttgaaattaggaaatagccatcacagagatgcaggatcaactgcttccactgctattttagttggtgaccgcttgcttgttgcaaatgttggggattccagagttgttatatgcaagggtggtaatggtaaaggtgtaggctttatacatactataatattgtatgcatattttgtactataatatattttatgtctgatatgaaagtaatttatcgtatagcaggagaaggaggcacgagacatagagcttccaaacattagatgggaggtttttgagctgatgatgaggtcaaataaattttgcattaatgtgctttatgaaagttgtactgtgaaagcttgtaataatttgtggacaacttaaatctttctccagatttatatacattggatcaatagatatttctcaattttttagaaaatacattctaagacgattctctagaaaccgtcttagaaagtctacattctaagattgtttttgcataaaaccatcttagaatccttaatttttttttataaaaaaaagacattctaagacaattttctagaaaaccatcttagaaattggacattctaagacggtttgagaaccatcatgaaaaatcttgactttccacgacagtgacttcaaagactgtttgaaaatcgtcgtaaaaagccccttggaaccatcttgaaaagtgactttttttagtagtgttataagaaaatgtgatgccaacaacaagttttagatttgaaaagttactttttaaaatttaaaacttcactattattattttttctccatacattaattatgtaggcaaaaagctattatgtgggacaaaaataatgtagttaattctaataattttaaggttaattttgtaaaatgttacaattaaatacaaatttaatgttatcaactaaattaaccaactttatgaatagatatgaattagatataagtgtcttacatttaagagacaaaggaaatgtgtgtgtataatttactatgaaaaatttatgattcaagtgtatgagtacggttacacgttactaattcaagtttaataacatgtaaaaagttcttcataaaataattaattactaaatacaataaatcaatagaataatattaatgggtgaaatataatatcttagttcaagaacaaaatttgttatttcacttcttcaaggtttttagcatgaatcatgatgataagttgttcattatattgttatttcatttagattatttctagtcaaagcagtaatataaaacatattttgttacttatgttttggtttacatgtttcattttgtttttagctaacaatcacatcattgccatgtcaaaactagcagagttagacacaatttcatgtaactatatgttgtttatataacatggttttgcacttgttcattgttgattcaattataaatatgttaacttgtatttaggtctcaagacggttttaccaatggaattaacaaccaacaatattgaaagaatgattacaaatctcatgtttaagagcatgaaattcaactacattctccaattacatcatcaacaaactctattcaacatgttattgaaagtaatagtgatctacatggaaacatctcaaaacccttaaatatggaagaaaaatcttgctatttctgaatgacgaaatacctacactaattgaatgtaacaccccggatgtctccggcatgttatcatcaatgatatacataacacgctatcagcgttaactaagcgcgatgcggaagcgatagaatcgtttatcttgattacattatgaatggaatataaaaaccatatataaaaagaacataaaacatgcccctgctgatccagataaaacataacaacactataggcagatacacaacataatcatacagagacgatcaggaggaaacatacatatatacatcctcatcatctgtacatatacatgctcaaaaacaagatcacagctgggtcatacattataatatgtacaggaaatgggtatacacataccctacaactacacagagatataagactagcttcaacacttgaagttctgctctggtcttctactgcagcctcccatccagcctatcaagtcactagggcctcctgccctgaggtagctcctctcctcaagaagcacctgaaaaccacaaaccccacacagagtgagacaaacgtctcagtaagctcagggttctgggaatcctccctaaccctggttcaccaccaagcataaacacaacatataaacagagctgaggaaatcctcctagctcacacatacaaagactaggacaatatcctagctttcacacatcccagccatctgggtccataactggatgctctcagcatcagaggtattccacctcatcttggctctctcagccatctcacagagatcaaagccatcatcatggcatcaatatctcatctaggctctcatagcctgtctcacagacatctcatagaggtacctatcatagtgtctctcactagacactttccatactagagaggcaccgcctctaaccacacaaacattgcctgaggagatccctccactcaggactttgagaatacaaatatggctcatctaagaggccctaggctctagtcccccctcgggaagccctctcttagagatacaacatatctgcctatcatctggcctggtaaaaccctccaggactttcataacacatgcctgggcaagaacattcatatagggcaatcacctccaggactttcacacacactggcctgaggataatcagtcaggacttccaacatctttacctaaggaggaacattcacacagttccatctgtccttaggacttaggtggagagcagtggcacctcccaaggaatctcagctattccaaggagtcctcaaactctacctttggctagggaacctcaactagcctgatactcatccagtatcttctaggttccatcacagaccatctcatgatctgcattctctcaaaaggcccacagcctcacacctgccatatcaggtgtctcataaccctcacactgtttcagtgtctatcctaggattcatctttctagaacagtctgagttccactctaagtaccgttcttaaagcccttccggcttccaacacatataattaatcaaacaggccactttggcctttcattccatagcatgcataatatatatatatatatatataatcaagcaaggcatgcattcgtcacccacttgggtggtaaacaagagaaaaggctaatccccagaacgatgagcttacctagctagccgtgcctcttagctctagcctccactgatggtctgctcctctgacacccactgtgtcaagccctaccaaggcatactagcacacatcacagaccatacaagcttcaaacatgcacaagctcatatagcagtcatccactgcatctgggaaaggaaccacagtccttcccatcaacccagtccactactctaaggttcatcaggctcatccatcacaagcctttccatagactatcagtggtctatcacagatcaaccatggcctcagagtcattccagactcaaaccaagccatcaccagtgagcatcaaagctctctcaacccaaactctcagggtttcttgggcttgaacggttcacatcacaggacaccgttaccctggccctttcaggcgcaacaagcccatcagtaaggctctggcatgtctcatatcaaatgactcagcataacttacacatgccaccacagagccaaaatccaaagttatctaaatcaaaaactgaaagctattccttcatcaattcatcgctctgaacacatctctcaacaggaccctgggctaattctatccccagctcatatgggtcactattcataaaaacccacaggatcaaaattaaacggagaaacgtgagtatcttacctcagtgacgactcaaaagacctcaggacaacttcctcaagctctagcgtcctttatacgttgtgggtcctcgccaatctcaagttctctgagtgtttcctctgagaaatcactcctcactcaaaggggtttttcaagagcagaaattgaaggattcaagctttcaaaggtttctctagggattaaaggtcatagggaggtgattaggcctagatatagggtcccaaaaagcttggaacagccatttatggaggttggaggtccaaggaggaagaagaagctattttccccctctttttcgcgtttttggccttatatagtgcccctgaccgacatgcggcgcccttggcgccaccttggcgctgatggccccaccttggcgctgatggcgccaaagtctagtgcatctggcgcccctggcgccactccggcgctcttggcgccagttttcagcacctgtggcgctcttggcgccacatgtagaattagcctatgtacccccggtagtacataggcttgttggcgcggtaccttctgttcggcttaattctcctattttcacctgctaaccatcaattctagactaaaacacctcatgaaggcacagaaatgagggtcattacattgaaaatcttgtcattattttgattttctatatcctttagcgaagcattgcccattgctttctgaatgacgaaatattgacacaatatatgataggatcacgttcacttcaagaaaaatatttattatcgacaaaatatttcccgcggaatgtattatgtcagaaatgtttaaattaacgacggaatttactgatgtaatgtattccattggaaaatgtttgaattacaaatggaatttacccatgacaagttttctataagaaagtataaactaccgatgaatttttatccattgattttattctattgaaaattaaaatattatcgacggatttttctgtcagaatacatgtctattggaaattaaaattttatccaaaattaaaagaattcaaccttaaccagaccctcaaccacttccctttggtgaattttgaaagcttttgcactcaccatcacaccgccattgcacaagctccaccaacgtcacctcgccgttgcatgaggtgccaaggcctccatcacgaccatcctctaatgtcacgcctaggttaccatcgcgcgcttgctgcagtcacacatcgtcgggtcatcctctcatccacatcatcgcgatgccgccattgaaccctaatcgtcgttgcacatgccgccacgcccacttcataggtagaaatatggttttaagctattgctaatgcaactattgcccccttcccccctcctctatactcttgttctcattaatacagttgcaactatattttattcacaccttaatgaaatcgaaattgatcttgctataaccgattgcaactatttcaagactacacatggctgaaaataaaactagcagcaaaatcctaatatcactcactcgcatttgaatctttgactgagattgaaaataatttctagcaaaattaaaaaatactgacaagttgaggatcaaatttaaacaaaaaaatatttagaaaccaaattaaaaattgtgtaaaagttcatagaccaacatattgaaccttaaaattataggcactttgactaatctatcaaagagatatattaattgaaaacaaatatgatgcatgtagagaacggagaatgaactgcactttgatgaaaaaagagaagaaagcatgaaaaatatcaaatttatgaaatgctctaaagttataataaaaataataataataataataaataaataagtaaataaataaataattacacaatttactactttgacaagaacaaagacagaaagagtaaactcacactactatatatatatatatatatacctatagatgtttctactttgataatatttttagcttcctatgcaataacgatgcttgaaagaaaatggaggtgaatattatgcatgttgtgttcccttaaatttggagaaaatcaactaaggaatgacatgatcttcaataagactatcaaagttgacaaattttggatgagaaagtaatttgtgagttgcataattgttaatgtttgcatataaaatgtgagaccaatacttataaccattctttggtcttttgaccaacaaaatggagaaacatttgctctattaattgatatgattattggtattaatacgatatcaatatagtattattcaccacattcaagacttgatctctttgtgtcgatttattctcaatttgcttcttttcttcaatggaagactaaaaatactcctattttttacatcctttaaattaaggtccaatgctagtttgagaactttatttttttcttcttgtgctccatgatgcaacgaaaaattatttttgttgtgtatttagttgtaatacacaaccaaaacaacttttcattgtatattaaaagtttaggttttttattaaaaaaatatttttcatatttatcaaatccttgtgtatcaaaacatcatcttttatgaaaattgagtgtatttagcaatagtatgaggtcatttggcaattatcttcactaagttatagttcaataaaattgctttaagattttcttcctacactattcaaaactcccatacatccagcaaaaagagtgaaaaaccaaaattgtccttcacttaaaaactcaaataaggattgcaccatttcggcttcctgcaccattaaacttccttgtaccattcagcctcttcattgcaccatcttctcctcctctttgcttaaatcctttggtgtttcttcctacacccattgacaatcctccgccgcactatgcttcatacggataggtgttaaaaaattaaaaaacttaccttcgctaccaccgcaacacccaccacgaagacgacgacgaagccaaaacaatgcaactatcgaaccataggtcttgaacctgtgacctttgtgttattagcacgaccaataactaggtagcctgagagcaagaataaataaatgtctaagtcttctattggtctatgagttttaaccaactgagctaataggtcaattatgttcaaaataattaatattgttatatataacactaatttttttaatgtatatttaatacacatataagttaataagtttacataataaattttgtaacacttaattttgatataataatttttttacaaatataaattttaaataaaaatcacaggtttaaataaaaatcataggtttaatatacattaaaatatgtaaaaaaaaatactttactagatcaaaattaattgttacaaaatttattatgtaaacttatatgtgtattaaatatacattagaaattttagtattatatatagtgacattaattatttttaactattagttcagttggttaaagcatcgtgctaataacatgaaggtcgcaggtttgagacaagcacgaaccattatttttaaattatttttaaagcatattttaacataatattgaccatatggattggcaatccatgtggactactggtaagggtattttcgattttctctcacattattgagtgtagaaagaaataagctgagtgcatgaagaaaaaacctgaattccatgtttactcaacaactaagtccaaactcttgagatttgtatttttcttttgtgattgtaatggagataattccttaaataattaatgggtataaacgtgaattcataaggacaaactttccggtttcataaattagggtgcttttattaattcttaattgtgataaaatgtttaggaattcgcttttaaaacaaatagataagtaaaaaaaataccaagaaagtctcacttaatttattaaataagatgcataagatattgtgaattcaccttgggagaaaataggtttctcacgttaaccatcacccggtaacacatgacgtgaaagtgagatgccatacataattctttgaatgttactaatctacacattaatgtaatgttttggcacaaagccatggaccccttattacatgtgcgtgattgtttggggcttgccaaaagtcacacatagaggtaaactagctatagaaatcgaacacaacacaagtctccaaagcgtgtcattggtaataggccattaccaaatgaagtggagcgagcatcctaaactatcatggagtgaagcgcacaataaaaaactgaagggccaagagtatataaatttaataaaataaaataacaatttgttcatatgtgcgaaatgaaatgtgacttcaataactaccatgtcatgttagcaatcagtggcggttccagaaaattaatcaagagggcactcaataagttcaaatacatatccataaaaataattacagaagatgggactagacagatgatggcttttaccgccttatttgaaggaggggaatatggagatagcttgaacttttatggcttatacaagatagaaagcaccttgtcacaaatatttgtgatgggggcacagggaagttcaagaatgcaagggggtttgctgaactaagagctcttatcctaccaggacagatttccactaatggtgcagagacactgctgaggatcacgatctatttgaaacactaaaactttagtgtggaaatgtaaaagcatctgggtgttattttattacggatgagtatgagattggtcttgtatattattatcagtttaatacattgtttacagaatgcatttgaaatcttagttgtaatcccaagaaaccttatggtgatttctttttttctttttaaatgataaattatatcacttggagtttcgattttgatttttgaatacaagcagaactgcagaagcaataaatgccatagactcagacaatgaaaggttacaagtaaaactaaaataataattaagcaaaacagtcataagctattaatatcatgagagttgaaagcctaagatatggtgttgacataagccataaagcaaaacaagtatcatggaaaataatcaggaaaaacacagaccaacaaagagagagggtttactgcatatgaacatgtaagaaagtgctatttagtagttcatatatatactcaactctaccggtttacactatgatcaacaatgcatcaggagttcataaacaacttccacgaaacccatttctatacatcaaatagaaattttgaagttaactttggcaaaataaatctatacatacaaaatgttgaccaaactaaattaagggttgaaaccatgagatatttttaactatatgaaaatccttttattactagaggtagctctaaattgttgttgacataaattatagagggatctctattgccaactaatgattcaccttcagttaaaccaatggacaccattaatagacaactatcaagtatcaactatgatacaagattagatgcgaattttatgataattacctaccaatttgcatgcagatcttcacatttcaatacaagctggtgacattaacatgagaattcaatgcagcttcatcaagcccgtagagtgcatctaccaagtgcattcgaagtgatgcaggaccttttgggaagatggaagacccttttagccagataaacagaatatccactcacaaattttcaccgcaattaagaacacaagcaccacctagaaatttccaatctttgggaaaacccttttgaccaaatcaatacaaaaacaaccagtgacacacattcctcaattttccaaactttgggacaacacattcgagaaaaaaaatcagcagattcacgatttggaatatactcatttctcatttttcttttctttttacacagtaacgatacaacaaaccatggaaaaaaaaagaaagggcagaaaaagattacacgaaccctggtgagaggaaggagaggtcgaggtgctcactgctccgtgcttgactgcttgaacgagaggaaggagaggtcgaggtcaaggtatgcagagtggactagggtagtttgtaaaaaaaatttaaaaagaagggtatttttagtattttcatctgaaaatttaagggggggcacttgccccccttctcttatacctgggtccacctttgtcaaaaacactctcccaagagattattgatatgaccaaactaccctcgttccccagaaggtgaagttcctaatcccttttttgtgtgggtgttaccactttcttgtatttttttcacactatataatgtggtgtatgtacattttttcacgtattaattttagctgaagtatttggatacatgtttggtatatgggctctattcaatgtaagcacgaagaatcatggaccctctcaatgttaatgagcccaaatctaacaaggctaagctttttttttttacacaaacaaggctaggcttaaggtattataaagatgttcaattgatattctggtcattgagcttaaatcaaggtaggctgaaacttttacttaaaaaacaaaaaatgttaggctaaaactaaaaaaacaaaaatcagaaaaaagaacgcaatgaatgtaatttagttggtagaatacacatctactgtaatttcccatgataagcatgtttagatattttatagataactgtttttaaacttttttctttttctcttacagtcaggttcacaggtgagattgtgttaggtgattgtttccttactcacactcatgttccattgtttaggttaattgtggtttttttttattctagttgcttcaaattttgtattctaaatgtgttaaatatatttttggttgtggttatgttatttatattccatgttttgttcatatagaaactcaaacactatatatatatgtgtgatttttgttttcacctaaaacatgaccaaaattattgctactaataatagagatcattctaagattattatgtgattcatgaatgtttgtattttttcttaaatatacagagcatgaattatattctttgaatcgtcgtcggatgtatgatagatgttatagtggtagaagcaatttgaaagagtcttttgtcaagggggttgaagagtttgtaagcaaaactagtcagcaagattgttatcacaatgatggggagataagatgtccttttgttaaatgcgattatactaggattttggaggatagagttgtgaagacctttacaaaaatgggttcaagcttaattattggattatgactgatcatggtgaatacatgtcgcatgttgatttaaatgatggaaatagttacattgatgctttaagtagtgcagaatatgtggctaggtggacaatttatctcaatgcaagatatggtgtgtgatgctctcaggcaacctaaaacatttgaagctcccaactcaaataatatgcaagagcctccaaatgaaaatattcaaagattttacaatttattggtggaggcaaatgagtcattgtaggaaggggcatcagactcaaaattatcaatatccacgagcctttagcttgcaagtccaattggaatgttctcgaccagtgcttaaaatttatttcaaaaatgcatttgaatgtaacacatataaatgagtgttttccaaaacaaagttatgatgctaagaggttagtatcaaagttgggattggaggctaagaggattgattattgtgtggatgactgcaagttgtaatataacaatgatggagagttaactgaatgcaaattttctaagaagcctagcatcgtcacaagactattggaacaagtaataaaaaaccagttccagttaaggcgatgttctatttgcctataataccaaggttgcagaaaatgtttgcaacaatgcaaactgcaggacagatgacatggcactatgacaatagaagttgttcaggcatgttatgccatccctctaatggtgaagcttggaagcactatgatctggtacatctagattttgctattgatccatggaatgtgtgacttagtttatgcatacatggatttaacccatatattcaagcatcatcttcaccttattcttgttggtcaatcattgttaccccatacaatcttcctccaacaatatgtatgactaaatcttatatgtttttaagttgtgtcgtaccaggcccatttaatccaacagttggtattgatgtttatttacaacctttgattgatgatctaaagaagttgtggaatggtgttctgacttacaatgtttctagaaagaaaattttcatgatgaaagtagctttgatgtggactattaatgattttcctgcttatggcacgttgtctggttgggggatacattgtagatttgcaagtccgtattgcatgaaggacacaaaggtcttccaggttggcaaatggggggagaactttttggtttgattgtcatcgtaggtcattaccaagtgatcatgcatttagaaggaacaaaaatgccttcaaaaaggggaaagtagaaagggatgagtcactgcctattgaaaataataggaatacttcacaacaaccaagagggggggttgtaacaccctcatatttacatgcacatttgtaagtttttctcattaaattatcaatgtgcacttttattttacaaaaattagtttaaggcaaaaatgacgaaaatgcccctagacattttaaaaatgaccaaaatacccttaccctaaaaatgaccagataattttgggaatcctgtaggaacttgagaaaaggacaatatacccctagagaacaaattatcaacaaagcagataacaagaaactatgaattagaatttctaggaattttaatagaaattttgaaaagaactcaatacagactaactcgagtatctgaaaaatacagaaaaatgataaatacaatctatagaattttcttttaattataggacaaatagatttctctattaagttagtttagtaattttactaattaaaagtgaaattgaccaataagaaactagaattaattattacatgtaataaaaggaaaaattttgtaaaattggcactaagaataagctttggccgtgtaatgaaaaaaccaagggagaaaagcttttagaaaagtaaaaaatgagtacatgaatgattaagaaagcttgggaaattctattggtccatgtggaagaggtcatcaatgctccaagatattttacaaggaaaaaatttatcaaaaagcaaggcatcacacggtggaaggaaaaatcaaaggggatgcctcaccaattaaagtgcacgtgaataatgaaacaaggaacaaggaggtggtagaacattcatgaagcaagacacttggaagacaataaatcactagccaatgggaactaaacaagtaaaagtaagtcataatcacttaaggaagatatttgaagatttttttaaaaggcaaaggctaacacttttgtataaaaagcaagtggggaccgtgcacatgatggcaacgtacaaacccctaagccttgtccctttcaaagcaaaattaaaacactttcaaaaccaaatcaagaggtgatcgtgcacttagcctttgcatccttttcactttgaccttcctatcactttcaagttataccttcatttaaaagaaaatcaagaccactaatcctagcaagctcacgtgggaatcaagggaaaaagaaagtaggagctgtccaaatttaggaagcaagcaaggtatgagaagttctttgataagcaaggtttaactatgaaacatgttatgatttataatcattctaaaagaaatttaatccttatttactatgtgtggtaaattgatttaaaaagcttaagattatgacatgaatggacatgtagttatgtgatttgatttttaagattaggaatgattaaatacttaaacctaaaatgaaggataagtaatttaagtagtataactattatgatttaaatgaaggttaagtagtatagctattgttggaaaataattgatttggttaaggtaaataaatgattaactaaaagaataaatttaatttaacttagtaaatttaaaacctttgagtattatgatcttagttaagtaaacagtccctttaaaaagatagtattatatagcaaatgtttcactaaagtttatgcttttatttaatattctagaaatccctaagtatacttattaaattttatatgttgtaatcatatttattatgttaacctattttaataaatgtttaagagttgatgtattgtgatttgtgataaactcgttgtcgacacgcacaaaaacaattttactaagctaattctgtagcacagagctaacctaggtcgacttagagacacgatcaatatggttctagcttcaaatcattggtaataataaggggggattttgtcaaacagttggtatgcgtaaagtaaacatgcaagaacacaaactaaaattaaagaacaatgcaaaaattaacaagattatcaaggagtaaagtaaaatagattagaaagcatcaatctcattcactaacccaagcaattcgaatcatcatcattctcataagttgactctatcatgaacattcattcaatctcaatagaagcagttcaatcgatcccactcctaaattaattgaaaccacaaccctaactgaactatcattcaattaatcttgtgattatcatttgaaattaagacatgaatccataatcctaattcactttaaatcctaaatgcattcataatcaagaaaacataatagaaactgaagaagaaggtgaacattcaagtagaattcgaaataccgaaccggaactccaattcttctcttgcttgagttagatccttggattgattagtgatttagcattccatgatgatcaacaaggaaagccccatgaaatgagtacagaaaaatggaagaataacaaaatggaaatgaagaagatgaagaacacttgagagaaaatgaagaacaggcttttgatcctaaaaactaaagaaaagaaatgtaaaacttgtttattgaattgtaagtgtggtgtgcaagtttcactaaagtcactaataaatatagtgactgagttctgcaaattaagtgggccacaaacaaacccaacaatctaattatttgctatttacaaccatgaaagtcaaattcgcagcccaaaattacaagtgcataggtgataacttcaaagcttaaaatgaccctctaaatgatagaattggcctcaggctatttctagaaaacttgtagatcttttgttatctttccggggactcctagaacactccattcggagattggtagcactctataggccctgcacaagtcagatacgtcaagtgagccaaaaatccgaaaatacgcaacaattagcaagtaagcctacttacttgcctaagccaaaactgaattagaacaggaaaataaaggtcgaacagaggtcaaataagctaagaaagatagaaaaatattcaactaaaagcactctatcaatttgttatgagaaatatatggttaaaatgattgtgaacccttgaatgaatacaaatatttggatgatttgtatggtgtgaggaatatagttttacatcgttctttcaagtgtttctgcaaccaagattgattaccatgtgactaatgaaatatgtttgtttaaggcttgagaatcgtgtggttgatgtatgatttataaaattttatgtgatgaatgaaaagaagttgtataatcattatctatatgcctttgaatatgttgacctttggtttataaagatgctaaaggaagagtaatattgatgatgacatatgaaaatgattattcatgcatgtttcattcatatgcatatgccctgcgggggttaagccgcgatgttgagtataataaagaaataagctaaggaaacttaggcgttacaggggtgagttggttgaaccttggtattttaaaacaaattcaaattagagtttcaggatctttatcactttcaaaaccaagaaaccttttactcaatcaaatagctcagtcccaagaaatcaatagatcaaaacagaacttgttgaacaatgaatatgactcaaagaattaacgatcaatgaataagatgagaatagagatataaaaataagaacacaagaaatttatactggttcacttcaaaacatgaagctacatccagtttcttctaattcacactgaattagagttccactattataaaatattcttacaagcttttacaagaacctcccctttatcaaccctagataaagaacggaaatctaaaaccctattagacttctaaggagaaagattcagagaacactactctgatctttaatctagagaacccttctctagtcccaagcaagaagaacccaattacaatagccaataccaacagaatttaaaaacagaattacaaccaatgagttaaggaaagaaacaacctaatgatccagtgaatgacatgcaaatgaatgaacaaatcaggttgaaagacaaaaacaatctcagagcatcctttttccttaacctttgaaacaaattttttgcttaaagaatcactcaaatacccatgaatgttttagatgaagcaagaactcatagaacccagaaaatcactttggaagtgtttagaaagcttgtgtatactcagaaatacgaattgatcaagttacaaacaaagccaagcttcacttctatttatagcataaagttgtaactaactgtaatcaattacccgctccaaataatcgattaaaacgagtgtgtaattgattaaattaaaatataatcgattaaagtgttatagaagcattctgggttttcaacatgagcaaaataatcgattaatatgagttgtaatcgattaacacatagatatttattctcaaagtgaactgtgtaatcaattactggatatggtaatcgattaagttaggaaaacatgaatttcagtttgaactaaataatcgattacagttcctgataatcgattattccaggaaggcttaaaaactaattttaactaaataatcgattacagaagtttagtaatcgattaaaattcataacaaagcagttcagtcctatgcaaaggcagaataatcgattaaaccgataggtaatctattaaaatgtttatgcaggttttccagatttgaacgaagaacaacataatcgattaacacttttatgtaatcgattaaaactgtgaaaaacttatttttcaaaaaacctttcaattcaattaaaaccttagttaaatgttaaaagctttgtttgatttcaatgaaacacttagttaaatcaatgaatgaatgaatgaatgcagggatcaatcagatagctttccttttacatcatatttcaattccaagtcttcaagtcttttaaggatgttgaaagctcaaaaccaatcttgaatcaaagacttcaaaacttcataaagctccccatgtatccaatagtctccccctttttggctttgaacgtgctaaattcttgattgaccatttgttgaacttgaagcttttaaaggaaaatgatcatggaagactttgaactttttcaaacctaaaaatttacactttctttgcaaagaacaagtgttaaagcatctgattccttttaatcaccattcattaagttatatctgactttaaattgctcattttattacttagcttccccttaatttatcaattaagtgaatgttcaatttctgtagaaattttgcagaaaaatagggatgaacagagcacaatgcagagcatgacaaattcaatcaatttcaatcaatttctccccctatttggcttatcaagtcaaaaatataaatggcacagcggataacacaaaagagaaatagaaagttattacattaatcattaaaaggatccattacaatgattaaagaaaaagaacaaaaaacataaaaaaaaacataacaaggcttaagaaagctaaaaggattcagacccttcatacatcagttttgtttccaaactttatagcctagttttgatttcttctaaggctgaattagtttcagccctatgttcatgaagaagagagaaaaggccatccatcttttgaatcatcaaggattcaaaggcactgtagacaggttgtgcaggacctctttcttgagcctctccttcatcatcatcttcaacctcagcacctccagcaggttgaggttgttggccagccatctgccaaccttgaggagtcttcaccatccccaattttgtgagatgcttctccttaatcatgctattgcttgagttggtgttgtccaccacttcattagacacatcaatgttgaaatagtctatgaatctagacacaaggacaacataaggaaagggatagttcataagcctcttagattttagcattatctcctcaatgatgagaatccaattcatctgaattgaattcttgagaccatacactatttgcaggtcatcatcagttgcttgggcatggtttgtggctctaggagccagaacatatgtgataatgaaatgaagcaacctgtcctcatgagtcatgggactagtacctagcctatgcctgagttgcatattgggactaatcaacattcccctatatgtatctattctgttgtacccctctatatcttcctcaaatttcctctcaccctcaaaagatatgccagcaacagcctcccacacctctggagttatctccattaccaccccacaaacttgagacctcaaagtccaatccattgatcctttggcacaagtgtagaacactttcaccaatttaaggtagtaagtacccttcatctccactaacttccttaatccttgagtctcaaggaatgcaggaaactgaaatccctccccaatgaaccattctaagtctaagtgtttagggggaccttgatggagtgcttttagttaaatatttttctatccttcttagcttaattgacttctcttggacttttatttttccattctaattcagtttttgtcttaggcaagtaagtgggcttaattgctaattgtagcatatttttggattttatgctcacttgacctatctgtcttgtataggacttatagagctctaaggaactccgaatggagcgttctagtagtccctggaaagataagaaaaagatctacaagtttgtcagaaaagccgaggctaattatgtcattttgagggtcattttgggcttcgaagtcagaatcactgcacttatattttggactgtgaatttgatttttatggttataaatagtaaataattagaattgatgggttttattcatagctcattcttttcttcagacttagtcactacatattagtgacattggacaaattttaacagacattacattatattccatttaataaaaacaatttacatttctctcttttaagtttttaggatgaaaatccttgttcttcattttctctcaattgttcttcattgttcttcatcttcttcattttcatttttctattcttccattttcttgcacttactccatggggctttcactgatgatgatcatggaaggctaaatcattaatcaatccatggatccaacccaagcaagaggagaattggagttctggtttagtatttcgaattttatttgaatgttcaccttcttcttcaatttctattctattttcatgattataaatgcgtttaggattgaaagtggattaggttatggattcatgtcctaatttcaactattactcaccaattaattggatgatattttagttagggttgtgatttcaattaagttgggagttgattcgattgaactgtttctagtgagattaaatgaatgttcataataggataaattcacgagaactatgatgattcgaatagcttggtttggtgaattggattgatgctttttaatctgctttacattacttgttatcaattctggtagtttttgtattgttctttaatcttagcttgtattttcatatgttttaattgttgcacgcaaactattcgataaaatccccattactgttattagtgatttaaagctagaaccatattgatagtgtctcttagtcgacctaggttaatcttgtactacagaattagcatagttaatttgttttggagcgtttcgacgaacgcatatcagacctataagctttgtggcattgaattggagataagtcattttatctctttctgcagagaaccaatggtttaacctactaaccactgggttagaggtttcaccagttgcctttctcttagaagtttttgccctcttagaagtagacatggtgcagggtttctagacataaataacagaaagaaatacagagagaaggagtgagtatgggtgtgatttttcttctgcacaaaggctgtattcatatagttctttgggctccaaaaggtttgaaatttgaataatatagcagttgggacgaattaagtcactgcagagaatttgaatttgaattaggtgggagttgggcagttacaatttccaagaaatctgtcagattttgcagtaactccatgaataatcgattatcttcttgtgtaatcgattattccgtgaaagaaatcacgttttgcagtgatggtaatcgattaatataacttgtaatcaattatttctgcacaatgctcatgaaaaagataactagtaatcgattatttcatattttaatcgattatctcaaaaatgtttgaattttaaaaacacattgaggctttggtaatcgattaatttgattggtaatcgattatcacagaaggttttgaaatttttgaaaaatgcatttccaggattttaatcgattaccattcaccgtaatcgatcaattcaatgaattttgctttgaaaaaggatgtttttaatcaaaataatcgattaattcgaacagtaatcgattatcacaggagaaaatttaatttttgaaattgtgatttttggaagaataatcgattaccaattcttgtaaccgattacatgagcgcaattttcattctgattctcaatttaaatgattttaatcgattatttcgaagcttaattgattattacaggagaattatcagttaatatgaattatgcagtacaacttgggaattttaggcttatggtgatttatggattcaaatggaaatcatttcacatagaaagacaaatatcaattaagcaatcatagattagactcatccaagattcctagcatgttgctaagtacatagaatctatctctagccagtggtttagtgaatatatcaactaattggttatgagtatcaatgaaatcaattttgatattacctttttgaacatgatctctgaggaaatgatgccttatctcaatgtgcttggtccttgagtgcattattggattctttaagatattaatagcacttgtgttgtcacacaacagaggtatttctttcagttcaactccaaaatcttgcatttgttgtttcaaccataggctttgtacacaacaacttccagctgagatatattcagcttcaacagttgacaaaccaacacaagattgtttcttgcaatgccatgaaatcaatgaacttccaagaagatgacaagtgccccttgtactttttctatctaacttgcaacctgcaatgtcagaatcacaatatccaataatattaattgaagcacctttgggataccaaagatcaacttttggtgtagccttgagatatttgaggatccttttgactgttgtaagatgggactcttggatttgcttgatatcttgcacacaagcaaacgcttagcattatatcaggtctactagctgtcagtaaaaccaggaggttgttcaacatatatatcctcctcaatgtatccatttaaaaaaagcacttttaacatccatttgaaagagtttgaaattcattaaacatgcataagcaagcaataacttttgatgctctttatatttttaggttataaatgagcctataaatgtaagaaaccaacacttaaaggatttattgtatggtcctatgagttacgttacagaatgacacacatactttgttaatggatacaaattccatactcaagcatggactgaggggaagaaaacaataaatagtggagttcacgtaaaagggcattacaaaagaatgtgaagatgatttctatgagtcattcaacatctataagagctaaagtataatagtacaaactatcctaagcgagtagtattattttattgtgacctgtttgatccaatgagtagaggtacaataattgatcctaaatatggcaccgtggaaattcgaatagataaaagatataatctatttgacccattcatcatttcacataatgtaagagaagtgcattatgtgttgtacccaacaataagaagggacatgcgtggttggtgtgttgcaattaaaatgaagccaagaggttacatagaattcgataatgtagaagataatgtatcttaccaagtagagaaaatgtcacatgtcaacaaagtcattgaagttgaaattatttctagattgcaagatttaagaggtggtgttgaagaagtggaccctactaatatgtttccaaacgaagcagaatcaaataatttcaatggagaatcaaataattttgaaaaagacaatgaaggggaattagaagatgactttgaagtttacaattctcaagaggattagacaaactatataatttttcttgaaattattgcctttgttatggaattattttagttttgtttttgagtgacatgatgtttcttacttagtcttaatgtttattattagtatcatcattgttttgttgtgatagttgaacactttattagtgttttttttgtgtgtgaaatgaaattatgttaattatctaattttaattcatcctattatatttgattcattatttgtaatattatttttctatatatagatatgtcatcaagaggttctgaccttccccgaccccgtcacatgacaatagtgtgaaagggacaagtgggaagaaaaaatgatatgtagttaaactactaccacctagagatagtctgccatcatctaccccatccccgtcttctgtatttatgtcaaccagattttctaatgttgcacgtacaccatctccatatctgactaaagctagaccatctctgattgatgcacgtggaccgtcctcggtacctacatccaaaccatccccatccctaactgtagcgaacatgcctactgatgaagacgttacaaacttggccatggaagccccccctaaatgatcatcctacgattacacttatcaatggagtgtaagtattaaaaatttaaataactatcattatatatcatacatcattttacctttttatttttcatgaattattttttctatttaggtttcgtccatctaaggttgcggcaaaggctatcacattatccattaggcaacaattcgctaacccatggcctacataggaaacaattccaaaaagatcatcaagaacatttcttccaacattttaaggtaacttattcacctcttaatgaattagttcaatggctgaaatgggtagctcatgttttagggtttttttccatttgaaaatggggtaatgctttttcttttggaaataagatttgataacaatcagttcgttctttagacttcaaattatatgtatatgaaaatatgttgtttgtcttgtctttggttgaatcttggaatatgacagactgaatatcatctcgtattggaaggaatttaattaggatgataacttatctgtcgtttttttgtggcttaattgatagttttaatattcagaagcattggaagtgagagaggttttcttcaagtgattatgatgtggttgtgttgattcaagtgaagtcaaacatcaagaatgaagaatcaagcttcaaaaagttttggacattcaaacatgcacaaaatgatgatactcaaaggaaagcttgaagaatcaatctgatcatatgtaaaagggaagtatatgatctgataatccatgtgtgtgtgtgtgtatcatgcatcattcattcatataagatcatgtggataaataaacaactaaaagaaattgatttgaaaggcacttagaaattaagtttttggaaaaatcaaataacacataaataatcgattacaagaaatcaagcatcgattattttgttcttcgtgtcctttagaaaacaaagtttgaacattgtaatcgattacatatcgttttaatcaattactctggcttttgttgaaaaatggtattctctggtttaatcgattacataagagtcttaatcgattacctgcttgtacttacattttgagaaaatgtaggctgtcgggtttaatcgattacttcatggaacaatcgattatattgttctttatctaaatccagaaaagctcataaacattttaatcgattacagtatgtcattaatcgattacattatacaaattggaaaatcatgtatctcgggcttaatcgattacgtatcggaataatcgattaaataactcgttcttggaactctgaatgtttcataagctttttaatcgattaccatcttgatttaatcgattacaaatgataaacaatcaattattggagcgtacttaatcgattattttcagttaaataactgttataaatagaagtctgcgacagaactgaaaaaataaagagagagaaaagaataagaactgaaaagcttagaattcgtgtgctattgatatgtcattgtagaaaacgatcacaaacaatcaagatattcatatgtgatagagaaacacatagaaacttcaattgattcatgtgggtgtgatgatcaagagttgaagtttcatcttgcaatctagtttcaagaaaagctgcatatctgtggtgataatctgcatattcatctgtgattcattcattttcattcatcaatggattatcaggtaatatcttttcttggcttttgattgtgtaaacaatttctttgtaaattgggaaaagtattttctgttgtaatttgtttcttgcaagcaaaagagatagggtttctctgtaggattcacttgagtagggttctcaaggtgaagggttggtctttaagaatctaatagtgttttagatttctgaatttcttctagggttgaaggaaaaaggcttgtaacattgcttgtaaagatattattgcaatagtggaactcctctctagtgttgagttggagaactggatgtagcctcatagtgtttggggtgaaccagtataaaaatctgtgtgttctctttaatctcttagttcaatttcgaattacattgtttgtgaatcaatatcattgctcaagttttgagatactctgttttctggtgctcttggaaggggaagattgattgaaaactgattttgttttaaagatttgttttgaatctgaaaattggtttttattgtgataaagatcatgtggcttaaaactctgaggtgaaaattttaattggataaggtttcaaccaattcaccccccctcttggttgtttgaagtgttcctttatttttcaggttgttccttccacatgttgaacatcattaatgggtaatcaatttataagtgagaagaaaaaacattgcattcatttgtggtctatatttatatccttcatttatgcccgaaaatcaataataagtaatgctacttttgttttatttaatctaaaattgtaaaattgatattttgctaaccgtgtgccatttcataactttgtgatactttagagaaaattggtatggagactcggggagattgtgtctggaatgatcttttatcacattgggatgcacttggttactgttccaaatgtgcacaagccaaaaaaaataagcatatgaaaaggggggtgtatccacacaagtggttctattagcttgcatgataacaccattcacttggtatgtacattaaaattataatacatacatctttgtacttgtttaatttactacttaatgtttattttataatatttgtaaatagtaagaggagcttggttgatctgcatacattgataaggtctttcagcaaactcatttatgaaaggatactggtcaatttgtcgatgatagatttaggcatacacaggtgagaccattatcttgcatgcttttttatttttaaaatgtttattatatttatgaaataatgactatttttgaatgatcagaagattttgaggcttgactatcttaagttaggtatggtgttgcgtcaagtgctggtgaatcacaaatcactcctttagaccctattgaagaacacagacttaggactccatgatgggttgcaactatgggaccaaagcgtaagggacacctttacggtacttgagatcttgctcgcaattataaatgtggagatgacagcttcatgcagcatatgcaaggatcttgcagtgtcactcaagattcagcggagattaatcgactaagggaggagctttgtcaatcaaaggaggaaatgcatgtattttagtcagttgtactcagttcctaccacctgaagcacaaaacattattcatcaacatcaacaacctgactagcagtagcaggaccaggaacaatacgacaatgaccaaccaaatgaccagcaacaataagatgatcacgaaccagatgatcaacaacaacaagacgatgaccaactatatgaccaatagaggcactctaacattgaatattttgattactgacttagcaacacttattactattgacatattagacattgtgctttcattttggatttattttgaatttaagtaagtttgttttatcatttgttttggatttatggatttgagtattttattaattacatgtatgtgttaatttaaatattgatgttaaatactataaataaaaaatattattaatttaccgatgttaaatactaagaaagaaaaatatgaaataataaattcctgtaaaaaaagacttaccgacggatttaacggcgaaatatattcgttggaaattttcgacgtatctattcattgaaaatttgtgatggaaagatgcatctatccatcgaaaatttctgacaagtagatctgtcgaaaaaagacagtcaatatttctgatggatatatccgccagaaattactaatgaacataaaattaccgacaatggggttactttacggatttttgtcgttgaaaatacccttttttgtagtgttacaactcatggacttggaataatttttccactcaccgtctctaaggccctcatatggtggcaaatagaaataactatacatcaatgacttacgtttctcctcctgtgttgttaccaaagaaacaagtgtttccataactttgtcaccttcctccagtgctagtattgacgataatgactttcaacaaattcttaggattgtttgcaattgcaaggactttggaacaataagagtaatctattaaaaataaaatactattattatgtaaaaatgagtgaaaattgaggataaggaattcaaatatacaaaattatgaggtgcaaaatctaaagaatggatatatttacatgtattttcttaaaatgagaggttgtatgtaacatcattgttaccatgtaggtcctccattactagtttgcatttcttgctagcaaatttcttttcatgttgatcttttttttttttttttttggttttatgctctcaaaaactagaagtcttgagaattctttagtaacttctctttccacatgagaccaatatcgcttatgttgtttggaaatttttatattgtctttccaatctagtatacaagcaacattcatgttaaaatttgatgacgatgtgacctgtcaacaaatttttgggattgtttgcagtgactgatttgaggctctaagggtatgagtgtagtcaatttagaaaataaatttaacaacagtaaattggaaaaaagtaagtttaaatacaatatacaaattagaagatgaaaaaatataaaaaataaagatatttacatgtatttttctcaagatgggaggacgcattttccactgattgtgtgcatttcttgttggcaaaatttttatattggcgaccttcttgtttcatactcacaagaaactcaagtgtggtttttttttttttatcctcattcaaattttaagtaaattttctttatatcaaggaccttggtcgcttaggtggtttccaatactttgtactttccatgaaggcttgaatctacacataagaggcaacaaattaatttagaatgtgattatttgtttaaagaatgtgaaaaacaaactaaaatcaaagaagaaacaaagaacaaattaagaaacctgataaatggtgagaatcggaaatcaaaaactaaaaatatgcgagttgaacttttccaccacgactattaacaaaatataaatgtcaaaagggtgcatgttttaataatgattatataaatttataataaaagattagattaaaaaaatgtaatctataagaaaaaattggtattaaagattttcttttattaataaaatatttttcattgaagttttttcttaatattttttttaaatgtgatattaacgattgtaatgtatgataataaaagaggagcttagactttcttttcaatctagtgtgcgagcgatattcattttgtattttgtcattatatgagataaaatgagtagattgaaagagaaattaatctctaaaatatatctttatttgtcaattaatctcttgtcaaattaattcatcaatcagtcatttgtcttaattaaactaaagtggtaatattttataatattattttatttttcatattataatagtataaattgctaccatctaatgttgtcaatggacttatttatactatatacttaaagtatataaaaagtaataataaatcaagaattgaggtcagctgaaataatgaaacaataacatattaaaatagtaataaataatatattattttcctttaaatttatcataaaatattatttatatagttaagttactctaaggatatgtttagaagccagggtatacctacataggatatatctatcttatcctattttaaatttttaataaaatatttggtgcatgtataggatataactcttttattacttatcttaattttagatagacaagctcttaggagtgtgcttgatattgttaggttaattttttagacaaattaatataaataaaaataaattaaaatatagttaactttaaaaataactccaaatatgtaaattttgtgattcagtttggtttgatttgatgttttttaatctattataataatttaaaatctatcaaataaatttacataattattatatattaatattttaaaaatataattattttttattaaattttgtttaacatattttaattgaaaattattattttacttcaatttagcattaatataaaataacatcaaatatttttgtaacataatagtaaattatacattatttggtatttaacaatatattatatatcattttttaatatatcaaagtaaaatatacatcttgattataaagtaaaggaaaagtaataaatcatagttatatgatttgtgacagtttaagcaattaaaaatcatcacaaataccttttttgaaattaaaaaacctaaactagtaatctactacaaatattgatagcttgtagtaatgtatccatagtatatgttgcatgggtattctttacaaaatcaaagtaccataaccacatactttcttaaagggggttatccttaaaggcataaagtttaatatttaaatataaagaatttacaaatgcaacataatgagtgttcgaaatcaaactcaaactgttgtaaattgtcaaatcgatcaaaaaaccaaaattgattatactaaaaagtacaaacaccgaaaactttaaaaatgcaatttttcgtgtttgatttagtttttggttcttgttatgaaaaccaaatcaattcaaaccaaactacatactatagttatatttattttatttaatgattgtttagcattatgtagtattattttaaaattttaataactattatttgacttatagaattatagtgtacttgtatctatagcaagtttgtaacatgtgatttttattgcagtaattagtaagaagtattaaataatttatatcatttcctttgcttggatatgggtatggtatcaaaaactctctagagtaatcgattaccatgcattttcatcgattacttggtccttaaagtctatttcaatgaaacataactgacatcttatctctaattcaaattcaaattttggttcagtgaatcgagacactcttggaattcgagatagctattatcaagtttttaaaattcaaattttaaacttgaaaaatctctataaattcagattttcaaagcctaaaaacctcacacctgaaaatcactctccctcttagcaaaacttagctaatcttttgataatcgttagcttagcggttgtcttgtttagcttctggttgtgttgtttttattctctcacattcagcagttatctttgatgtttaccttcatgttctcagcttcaattaatgaataaaattttctttatgttgtttacatcttcattttcctatttcattatcactggtatattttatctttgataagccaaaagggggagaaaaatgaacataaaatgaacatatgaagggtgctgggtgaataaaagaatagaatataagtggagaagaatgataaactaaatgataaacgataaatttctactatgatttaagtgagcataagcattgctcttaatctaacatgatatgaaaatacataacaaaagggggagcaatgcatatgcttatgatgttttgagtttatgcaaggaacaattaacacctggtcttggctagaggcttattattttttcaggtctcaagtaaaagctcctggaaactctctcctaaaaagaacactaaggtacaagatgttcaattaaagtttggcatgatcaaagccaaaaagggaaagattgttagagtcagggggagcttaagaggatcaagaagctaagtctcttaggcaacaaagtatttaggcttttttacatgccaaatcaattgattggtagctgtaatttgtgtatgtttaagggagactacctatgatccatggcataaagctcatacatgtttttgcatccatgtttttataaaagcataagctttgtgaaaaagctttttcgaaacataaagttttcatggttgataaaaagccaaagtgttcaatgtttaagtttttggaaaaacattttttctctgctttaatcgattaccagcaaatgataatctattacttaagctctcaagaacactttaatcgattacaagagtttgataatcgattacactacacaaagtcacagaaaagtcttcctgtgatagttggttacgatattgttgtaatcaattacttgacacatgtttagaacaaagactttatgtgataattgattacattgcgaattaattgattacattgctcataaatcttttccagaaagtttaagaacattttaatcaattaaaagagttattaatcgattacatgagtgaatttaatcgattacattagtgaattaatcgattaatgacaattacaaattgatttctataaatagttgttggatgttttgaaaagatacaacgaaatatcaaagtacttttataagctttccgaagtaagaaaagattccaagtgctaaactctgttagacccacaaatcctcaagcttcaagatttctataaaggattcctttttgtgcaagtttcaaaagtcgctttggaaggaaagttctgaagttgtttctttcaccactgattcaagtctgttaatattttgcatacatcatcactgaatcatcaggtggtttcctttcttacaacttgtttgtaagatcttttgaatttccttttgtgcagctataaaaatattttttcttaaggcttttctagaataggtgtttctaaagatgagagataagttttctttatgtcttgatcacaaagattttgagttagaaatctcattcttgatctttgtgtgattgagggtggttgtaaaaagcttgtaagaaacaaattgttattagtagaactctgacttgttggttagaagaactggatgtagcttctctaggttgagaagtgaaccagtataaatccttgtattaactacttgatctttatcttttcttgccgttattatttgtcattcattggtgttgcatttcacaaacaacataaaatgtttttgattgcattctttgagtagtggtgtttgattagttgaaagctttcttggattgttttgtgatactatttttttaactatgattgtttaagaatttttaattgtctaaaatcaatcaattcaccctctcctggttcttgtgtgttgttcatattgttttcaattgaagcattggggagtcttgtggattgtcctactgagataaagtatgatgacttcattacaaagttttgaaattgcttgctcaccatggccaatgtttgttgattatgtcaaacacacgtggtttattccccacatacaaagatttgtaacaacatggacgaataaggtgatgcatctaggaaacactacaactaaccggtatgaaaattgttaatctatattaggtattttaagaacacattaatggatgaaaataattatttgcctttttaaatgcagggttgaatctgcacattggaccttaaagagactactccataatagccttgcagacctatgtagtgtttggggtgccatgaacaacatgatcactttgcaacacagtgaaataaagacatcttttgagacaagcacacatgtggtcgaacatgtttttaaagttaccttatacaagagactaattggcatgatatcaagatatgcattaaacaatattgttgagtatgagcaagtgaattatgctagcattgacaattctcgttgtggatgcattatgggaactactcaaggtctcccatgtgcatgtgagctagctagatatgctgttgatagcataccacttgacacaatccatatgtgttggcagaggctaagttttttagaccaaggtttatttgagcccgaagtccgtttaacccaagagacggaagccatatccaagcggtttgaagatcttgatatatgtggcaaagtgactctaaagagtaaatttcgagaacttgcatatcttgatctaacttcgatgtgtactcctcttaaaaaggtgaaaacaaaaggtgatcaaatgaaacaaatgaccaaacaacaaagatcaacgaagcgtgattcatcttatttttgagtatgtggatgcatatgttaatcataatctgatacatagtcaatgaaataatgcaaaatcatcatcctcgcccaccaccatctctcccatatgtatccctcctttgtcttgaccgaacataaacattttcgtgcttagtgacacccctggctaatcttatacacttgtctgttatagtgtatgcatcagttctagcagtcaccatcattatatctaacatgtgttgcaagctttctgctaacttttgaaaatagcctaagacaatgaaacaacgtgaaaaataatattggaatatttaagaaaaattttgcttaatagaattgtaagtatattataccactgcatgtcgaggcatttcaacatcaacaggtgttgttgcaagtggatatggcattgttgttgtattctccgtcgacacaggtggatgtggcataactgttgtaggatcatgcaccatgagaggatgtctaagaggctccccaacctgtggcaaacttatgaatgggtgaaatatcatataaaaccactccatatagcccagagcatactgagcaagaaattaacaaactcctattgatgcaacatattgtgaaaagtacattcatctatcatcaatgtcatttgtatatagcgatggagaactatggagtggaggaatggactgaacatagccaaattgtcgtaataccctctctggtaaatgtttaaaaatatatggaccccatctgatatgtccataaaatagtgaaatcaactaaaattatttgaaaccacaatgatcaccataaggtattcaacaaacaacatctgctgtcaacttatccaaccacttatgataggtgatcagtggtaatgccttcccacacttctagcgacacacacttggtttgctctagtggtagtcctcattagcaatcatattcccaatagttaggaaatgcttgtagatccaagactacacatatttaaaaaaatgaatcagaaaatgttaatagtacatataaagttaaaaacaaataacaatgataaaaatcaatataattaccagcaagagagtgatatatcttgcaagatgtttagccttgtgcttggacacataattcagattctcatacatatgtactagtgtagccgctcctcgtgaaaactctccagatttattaaggtcacgaaatgagttccagaataccacactgatatgtgtgacactcttgttagcaaacaatgtgcaacctacaagatgcaataaatatgctctagctgctagttgataagtgccacaaatcagtagaaaataggattcaaacatggcacttattcatcatttttgtagatgtaatcacaagataaccctagaaacctagttaaatgatgatgatattaaggtaagctatgcttttgtgtttcaagaagctttcgtccaattaattgattcaattttgctaggtttgaagattacggaagagccaagcttgcgaaaataggagcctagggtgaactaagcaaaggaaagagcctcaaacagcaaattaggcccaacagacaccaaggcccaagggattcttcaaggttaagtctttagctcgcccaagccaccaattcatgtgtattctagtcgcctgggcgacccacactccccaaggaaccgccctagctcgcccaggcacctgaaaataggctattctggtcgcctgggcaccccaagcaggcaggagaccatttcctataaatatgggacgaattttgggagcaaggcatgttcctcacttcattttctctcctaaattcagttgcttgttcaaatcttttgtttcttagcttcttgagtgagtgtagaacttagggaagtgaggttgagtgacttgtgtaaggagattctgccaaagagaggatcgatgacgagcttagtcggtgattctctcgaggaggttctgcccatgttcgcttaagcttctctatagattggacgtactcttcttatccctatgctcttttaattatttatgcatcgttctacttcttgttggtaatttcattctacgcttaatgcttgattctacttgatcactagggtcacgaacttaaattcctaagtgagactggaaagtaatcttagggtttgaacttaatgaaattactcgttacgttacgttgctaggaatagagcataatgtttcgatcgcattaaacacgtgaatatgatcttaatgcttggatatttaattaagtatgcgatgaatcgatatttagtaaaatatccatagggcttaattgcgaggaatcgagttaagtttacctaaacgtgtgcgtcaacaagaatagaaaatgcatagataaaatcaattaaagggataagcaagacgaaacccaatccaatacttacttgacttgtatccgtttatttattttatttcccgtcatcgtttatttgttttccgttatcttattttacattttctgcaacaacaacaacaacaaatgaatcttcgctttttatctgtatataactactaaactgttaattttaaatcaaccgacgtaaacccaaatccctgtggagactaaattttataaattcgaaacttacagcgataacaacggtacgcttgccgtggtgaaaattcctaacaagtttctggcgccgttgccagggatttggcttgtttacttaaattgtttttaaattttcagtttagtattttcttgttctttattttctgtttttgtatatatttctttgttattttaaaaacctctgtgcttaacaaaaatcttgtagtttctttcctttccctttatgcgagataagtctgcagataaatctcattttgatccggaaatctccaaaaccgaaaggaaacttcgaaagaaaaagaaacaagagactgataagcacattgagggaacttcgtctattgatccttcctcaccacaggtaaaagataatatggctaaccaacaagggcccaagcattataatagcatagttttccctccgtttcacaacaaagttgtagaattgaagcctgcactacttagcctcattggctcgcaccctttcgccagactagaccatgaagacccatatacgcatctatctactttcatggagttgtgtagcacgatgggagcaccagacgaggatgcagaagctgtctatcttagagcttttcctttctctttaacaggtaaagcaaagacttggcttcaatcacaacccaacaagagtctaagcacgtgggaagccttggaggagaaattcatcgttagattctttccgccttcaagattcatcagtgcaaagtctgccattgccactttcgctcaaggaatagatgaacctctctgtgagatttgggaaagatttaaatcactattgaggagatgcccgaaccacaattttgatgacgccgctcagttgcatatcttctacagtggtctgaggcctcaaaccaagatgatcttagatgcttcagctggaggaaccatgatgtcaaagagtcccgaggaagcaatcgtaatcatcgactcaatagctgcaagtgattattagtctcaccatgataggtcacccattcagaggaaaggcgtactaaagcttgatactcaaagtgctatcttggctcaaaacaagctcttgacccagcaattagaggccttaaaaaagcatataggccaacttcctcaacttcagcaaggaggatcacaaaaaacacatcaagttcaacaaaaattgagttgtgacttctgtggaggcaaccatcagaatggccattgttcaatatctagtgattttccacaagaagagaaagttcactacatgcaaaatcaatcaagacctcaacaaagctatgaagggaattaccaaggttatcgcaacggtccaggttctaatcaaccttttaatacttataatgcttataatgtccccactaaccctccttttgcaagttcttctaatgcttttccaaatagaaatatgccacagcaagatcaatctgatagactgacaaagctggaagatactcttactcagttcatgcaagtgtccatcagcaaccaaaagaataatgaagcttctatcaagaatctagaagtgcaaattggacaacttgcaaaagcagtagctgagcatggaggaggatctttctcagcaaatactcaagttaaccccaaggagcaatgtaatgccattatcacaagaagggggaactgtggttggtaggaaagaagaagaagaagaaaaagaaaaggatgaggaagaaaccaatgaaagaattgaaaaaaaagtgacaaatgaggagaaaaagagaaggagtgacaaaggcaagacagtcttaaccccaccaccagtccaaagaatgccatatccacacgctccatccaagaattcaaaggaaagggagtacaagcgttttcttgacatctttaaacaattacaaataaacattcctttttctgaggcgttggagcagatgccaaaatacgccaagttcatgaaggatctccttactaaaaagagaagatacaccgatgaggagaccatagagttggatgcaggatgcagtgctatcatccaaaagactctcccagaaaaatcgagagatccaggtagctttacaatccctgttactattggtaatttttctgtgggaaaatctcttcttgatttaggtgcaagcatcaatctcataccattatcaatggttaagaggatagaaggggttacaattaagcctactaggatgacgctgcagttagctgatagatccattaagcatccatatggcgtcattgaagatgtgttggtgaaagtcgacaaattcttcttcccagtcgactttgtagtaatggacatgaatgaagacagtgaagttccactgattcttggcagaccctttatgaagactgccaaggtgctgattgatgttgatgaaggaaagctcactatcagagtacaaaataatgaaatccaattcaatgtttttgaagacatcaaacaccctacaaatgaaaaagaatgttttaaggtggatgtcttaaatgagaaagacacagcagttgatagctcgtccacatattcaaatcatttggagccaaagccatagcaaactcgtccagctaatacgacgttaaagaagcgctcctgggaggcaacccagtgtttttaaattctgtcttttattattagtttatatcttatctttttgaaaatatcatctgttttgttagaatttggttataggtacattttgttaagaaggcaaaagcaaggaaaagaacgtggcagattttgttgattagctgaagggaggacataaagcttctcagccacgatcttcaaaaacagtgatatcgttttaaaatttctttactgctttatagtttttaaatccagtactttgactgttactatgtttgcctctttttgcttgcacatagaatttttttcttttctaaattacacatataaaatacttttttcttgtaaaaatctttttgggacttaactgatatatggtgttttgaaaagaatcaactgaaaatgttttgaaacttcttttaaaagatcagaaccacaaaaataaagtttttgtagaaaaccttgagaaatgaaaaacaaaaataaatggtcttttcagaaaaatcaaaatcaaggtaaaaagtctttttgcatggaaattgagaaataacttcagagggaaacaaatgatttggttgaaaacatgaaaacagacgtttagcccaagtgagtgtgtgcatctaaacatacattatacacagagagatctcactggcataatctatagtactttttgcataaaattctaatcgtcataagcatatgattcatggatatgatttaggccatcttttctttttgaatacattattagccactggccaaaaagctatcccaaaatatattaaatgatttatcctttgcaaccccctttgagccttaacagttgatattttattgaaaccctagcctaggataggaattccataccttacctaaggttaggagagcaagaagggaatgagttgtgatggaaagttcttttgggtagttcatgttatgaaaaggatttcttaaaagtggttttgtgtaattaatgataaagaaaaaaaatgaaatgaaaaagaaaaagaaagaagaagaaaagaaagaaaataaaattccttgtgataaaaagttgggtgaaaaagaaaatgatgaaaatagatatcttggaaaaagagaaaaggaatagcaggtaatgatctaaatatctctatcttagcttgctctcctagtcctaaggtcatttgaatatccagaaaaaccaagatttctttctagccaagcctagccataaaagacctaatgatccatgatgagtatgtattatgatttgatgggaaatgaactgcaaaatttatctatgatatatcagtgatagatgtaagactaaacacttacctgtgggagaattaaacactttttgagactgtttgaaatcagtcaaatgtttcctctgaggtctttttgaaatgaagtgtaaaattgactctaaacctcaacttgatttcatgaaaatccattaaattgttttctcaaagtatcaaggttaactactttttgaaaaatctgttctgatcaaaactaagttgattcttgtcaaagcatgatatccttacctttgcttgaggacaagcaagattctaggtaagggggagttgaaaagtgccagtaatcagtagaaaataggattcaaacatgtcacttatccatcatttttgtagatataatcacaagataaccctagaaacctagttaaatgatgatgatattaaggtacgctatgcttttgtgtttccagaagctttcgtccaattaattgattcaattttgctaggtttgaagattacggaagagccaagcttgcgaaaataggagcctagggtgaactaagcaaaggaaagagcctcaaacagcaaattaggcccaacatacaccaaggcccaagggattcttcaaggttaagtctttagctcgcccaggccaccaattcatgtgtattctagtcgcctgggcgacccacactccccaaggaaccgccctagctcgcccaggcacctgaaaataggctattctggtcgcctgggcaccccaagcaggcaggagaccatttcctataaatatgggacgaattttgggagcaaggcatgttcttcacttcattttctctcccaaattcagttgcttgttcaaatcttttgtttcttagcttcttgagtgagtgtagaacttagggaagtgaggttgagtgacttgtgtaaggagattttgccaaagagaggatcgatgacgagcttagtcgatgattctctcgaggaggttctgcccatgttcgcttaagcttctctaaggattggacgtactcttcttatccctatgctcttttaattatttatgcatcgttctacttcttgttggtaatttcattctacgcttaatgcttgattctacttgatcactagggtcacgaacttaaattcctaagtgagactggaaagtaatcttagggtttgaacttaatgaaattactcgttacgttacgtttctaggaatagagcataatgtttcgatcgcattaaacacgtgaatatgatcttaatgcttggatatttaattaagtatgcgaggaatcgatatttagtaaaatatccatagggcttaattgcgaggaatcgagttaagtttacctaaacgtgtgcgtcaacaagaatagaaaatgcatagataaaatcaattaaagggataagcaagacgaaacccaatcctatacttacttgacttgtatccgtttatttatttcatttcccgtcatcgtttatttgttttccgttatcttattttacattttctgcaacaacaacaacaaatgaatcttcgctttctatctgtatataactactaaactgttaattttaaatcaaccgacgtaaacccaaatccctgtggagacgaacttttataaatttgaaacttacagtgataacaacggtacgcttgccgtggtgaaaattcctaacactagtgtccattgccatgcgtcacatttggtacaataaatgtctcgcagacagggaaggctaacatatgcccctctacattgctctgtctcgtctactgcttgttgtgtagtcactgcaagtaactcaactaacaactccacagcttgttctacatctattgcatcataggtatcgaagacacctataatgggtagatgtaacaacgatgccacatcattgagggcaatactcatctctcctctaggcagatggaaactggtaatttccttatgtagtctcttagcaaaaacagaaaaaagtcatttgtctcttgtctccaatgaacatgtaattagagaacttaagtctttaccaaccaccaaaccttcaattttaggtgcagaccttcctcccatgagaggtcaacttcagctcaatacgttcctgcaaataattataattaattaggtaaattaaaatgataaataaaatttaaatatgttataactaaagaaataactacccttcttgcccacaccttggctgccatatgatcaacatatgatgtcaacattgatgtatcttagggtccacttggaaagccatatgaatcagcacctacatcctccgtaactggatcatgaggcttttcgtgagcctcgctagcagcatgatccacatgctcaatatcctcgacaacaattgtagttgcccgttgtccaagtgctgatgttgttggccttcagcgctgaggggcttattcctcatcaccactaacctctatacctaaagctctgcctaaagctcgacgcaatcctctcgttttaaccttaatctaaattttttcccaagtattagtctaatacttcaaatcaacccacaacttcaagaaaatactcttaaattgaaaataaaaccatattaataaatgttctaaaaccatactagtatttattaaatgtagtatattttaagaaatgtagtaaaaaatttaaattaactttaaatgattaatcgagcagagtaaaataaagtttgatatttgacgaattttaggttaatttcttaaaacattttataggtatttttttcaatttgaaaaccttttctatgattaattaaacactactctctcactctaaaattgcatcagaaatagcaaatgaaaattatttattaagcatgttggcaaggtaattgtgtttagtatttagtcttttcttttttgagattttttcccaaatcaataatctctaattaatggaactaataattgatgttatgtaccaacaaaactaaaagattaatgtcaaattatagttatatctttgataagatcacacaattgtacatttcaaatctcttatttagtgtctgtttaaaagaatttatttgaacttatttttgacaaacacgtgtgcaaatatctcaaagattttatgaaaatagattataatatgtttagaaattatgttaaatttatttaaataattttctacaataacttttgaaaagaacttacagcttatataaaacaattaatataaattattttcatgagtactcattcaacaagtctttaattaaattatttatccaaattaatcataattatatttgaaaatttaagtgttaatataataaattcattaattataatttttttctagtgtattagacctatatggattcacaatttgtatggtctatacatattgttaatccgtagggatttaacacaacgatgaggtgagagcggtactcacaacgtgacagcgggatcatgagatgaagaagggattgaagaaacacaaattgatgagatgaaaggggaattgatgaaccaattgaagagaagatgaagagagactcacaataatgcaatgtaatggtgtgaaaatgtagattatgttaacaatcatttgaacacacatgctacagaaagagatattgaattgcattgatagcagtaacgaaaaacaataccagcagtagtagccacttacaaaatgaataatagctctgcttatatagcaactttcacatattgataaaagccactaactctaataacagaaaattagttatctaactaactttttaaactttgaattatccttaacactcctctttaattcaaagttgcatttacacatataattccaattgaatctcttaactctctaaacctttctaacttcaaagctttagtaaaaatgtctgccaactgaatttcagttctgcagtgctctagcttcaacttctcattgctgacttgttctcttataaaatgaaatcttgtttctatgtgcttgcttctaccatgagatgctggatgccttgctaaatcaatggcagatttgttatccactagcaacttcactttgcttttacctttcacttgcaattctgtcatcaaggcatctagccaaacagcttgacatgcagtttccgaggctgcaatgtactctgcttcacaggaagaaagtgctacaacaggttccttaatggaggtccatgaaattggtgctcctccaaagaagaagatatatcctgctgtgcttttcctgtcacacttgtctccacaccaatctgaatcagaatatccaactaattttggttctgaatcagcttcccctttttggaaacagaattccaaaatcaattgtaccttgcacatatctcagtatcctctttgcaactatcaaatgggactgctttggctcttgcatgaatctactaattaacccaacactgaagcttagatcaggccttgtattgcacaaatatctcaaacatcctactatctttctgtaataagtaggatcaattaggtcttcatttgtatcattcttcaagataagcccaacttcagctggtgttcctactggattgctttgctgcatgttgaatcttttcaaaagatcttttgcatatttggattgatgcatcactgtaccatattgagtcgctttaaactcaattcccagaaagtaagtgagtagtccaaggtcactcatctcaaattcattcatcatttgacctttgaacatgataatagcatcctcattgctgccaataatcaaaagatcatcaacatgtaaacagactatcaatttttttgttttctcactgtttttccagcatttcacatagactccatgttctgaggtgcatttctcaaaaccaatttgggacaagaagctgtcaattctcctgttccaagctcttggagcttgtttaagcccatagagtgctttcttgagcttgtacaccatactctctttgcctctgacctcaaatccctgtggttgatgcacataaacttcttcttctaagggaccattcagaaaagcagacttcacatcaagttgatgcatggaccagtcaacattggttgtaatggctactaccaatctcacagtttcaatccttgccactggtgcatatatcttaccataatcaattcctgctttctgcaagaaaccttttgctactaatttggccttatacttcactacttctcccttaggattaaccttcactttgtagatccatttcagtgctataggcttcttgtgctgaggagaatctaccaattcccaggtctgattcctctcaatagagttgatctcctccttcatggcttttaaccatttctcatttgtcactgccttttcaaattcaaccggctcagcttctgctataagtgcaaaatgcactaattcaccatctgagtttactggtgaatattgaaacaactcatagtctctcaaatgggatggcaattgacttatccttgctgttcttctcatagtttggtcagttagtgcagttgaggtttcttcttctaagaatatcctggactgaacctcttcagaggttgttccccaattccaacttttactttcatcacatatcacatccctacttatggtaacttgaccattctctggatcatatacagtttataaccaccagttgaatgatagcccagcaagatgtgttgagtgcctttatcatctagctttcttcttagctgatcaggaacatatttgtaacgaattgaaccaaataccctcaagtgagtcacatctggcttcaatccagtccaggcttcttctggtgtcataccttcaagtctcttagtaggtgatctattcaagatataagctgatgttgatacagcttctccccataagtagcttggcaggttttttccttttaacatacacctcaccatgttcattattgttctgttccttctcttagcagtaccattgtgttgaggtgtgtatagtggtgttacttcatgaattatcccttcactttcacaaaactgtttgaagtcatttgacacatattcacccccaccatctgtccttagaatcttaatcatttttccactttgcttttctaccaaacatttaaattttctaaagacttccagtacctcatgctttctcttaactaggttgatccagactttcctagttaaatcatcaatgaaggagataaagtacctatttcctccaagagtgtccacttgcatagggccacaccatcagagtggatgatgtcaagtttctcaacagcatttatgggaacatacttgctgaaactattttctagtttgtttgcattcaatacactccttgcacacctcttttgggactaagacctgaggtagtccttcaaccatttggtgtcttgcaagaagatgtagatccttgaaattgagatgaccaaatctatggtgccataaccattcaatcttgttttctgaagttgcaagacactcatgcttcataatattcatcccaattctaaaggttctattctgagacagatttgccttaatcacaagtttctggtttttatcaaataccttgagacaattgtcctccatcctcatcacaaatcctttttcaagtagttggcccagacttaatagatttgtcttcatgccaggtacaaacagtacctcctcaatgaaaatatcttttccatcctgtaccttgaatgctacttttccaataccttcagcagtcaatgtactatcatccgcaaattgaactttgctcttggatgattcattcagattgatgaaccagtccctcttccctgtcatataagtggagcagccagaatctaagtaccatgaggagtcacttgatgattcactgctaatggtagccataagcaatataggttcagaatctgagccttcatcttgagccagatttgcatggttgctgggtttgttcttggcagcttctccttgccaacattcttttgcatgatgaccaagtttctgatagttgtaacatttcacctttcttttgtcaaacttccactccttcttgttgttggagtttattttctgaaaagtttgatatgctgtttttcctttgttgaattcatttccttcagctgtcacttattcttggttctttgtgatggaatttaacttgtttcctttccatggtgctttccctttccctctataattggatcttgcatgaagtgcctcttcttgatgggatcttctctcattgatcctcatctcttgtgcctcaagagagtgctgcagttcttcaatttgcattgtttctagatcctttaactcctcaattgcaacagctacatgatcaaatcgtgatggcaaagttctcaatattttgtctaccacttgttgatctgaaatagtctccttgcaggccctcattgcatttaccagttcttgaattctgtcaaagtaatctgttatggattctttgtcctccatggtgagaagttcatattgccttctcaatgtctacagcttgattttcttgttcttcttgttgattcaagtgaagccatgtgcaaatgagcaaggaatcaaggcttaagtgttttgtgctttcaacatgctcaaggataaaagttccaagaaaagcttgaagaccaatttgattattgtaaaagggagtttatgatctgataatccaattgagcatatcatgcatgaatcattcatctaggattgtttgattaaaggtcttagtaaaagcaattaactagaaagacatttaacaagcaaagtttttggaaaaatgaagttctactgtagtaatcgattacaggagcgtgtttaatcgattattttcagttagaaagttgttataaatagaacccattgctctgtgttttagtgacttgagaattttgaaatctgagcattcacaaacattcacaagctttcattagtgactttctgagtttcaaaaggcatctgggcttcacaaattcatatggttttttgattcaaagaagtgaagcatcattgttcatcaaagcataaggaaaggaatgcattgagtttgtaatttgtcattcaacctgttaaatcattcatttgcatgagttcttggattatcatgtgatatctttccttattctttgaaggtgtaaaactgttatttgaatttttgtaaagattagtctattgtaaatgggtttcttacatgtttagagatagtgtttctctaaggacagctgagtagtgttctcagtgtgggttttggtcactaatagtgttttagacttctgaactttatctagggttgataaagagaggcttgtaattgcttgtaagaatatttttgcaatagtggaactctactctagtgttgagtgaaagaactggatgtagcttcatagtgtttgaagtgaactagtataaaaatctgtggctaatctttcttctcacctattcatctcttaattgctttgtttgtgaatcaatctcattgcacagaaagttatactctgttttctattcctcttggaaaaggaatttgattgaatattaattcttggttttgaaacaatttttaaagtgataaagatcctgtggtaactctgattttaaaattttaatttaccaagattcaaccaattcaacccccctcttggttgtgttgaagtattctattcattttcaattggtatcagagctggttcttgtaagttactcaagatcattttttcttttcaaaaaggaaaatgaatacttctcaaataacctttaaggtgggtgcctctttaaacagacctccaatgtttgaaggggaacacttcagtttttagaaaaatagaatgaagatctttattcaatcaaatgacctaggagcatggaatgcaatagagaagggtccctttattccaaagaaaactgtggcaaatgagttgattcccaaagaatgggatgagatgactgaggctgaacaaagaactgcccaatatgattttaaagctaaaaatatgatcacctctgcactttcctctgatgaatttttcaggactgtgagatgcacaagtgcaaaacaaatgtgggaaatgctggaaatcactcatgaaggaactgaggaagttagaaggtcaaggaagcatgctttgatccatgagtatgaaatgttcaagatgaacaccaatgagagcatttctcagctgcagactagatttactcacattgtaaatcaccttttgggtcttggaaaagtatttgatactgaagaattaaacatcaagatattaaagtgcttgacatgaccttggcaaccaaaagttacagcaatcaaggagtcaaaagatttgtcaaagatttcaatggctacattgtttggtaagcttcttgaatatgaattagaaatgtctcaattaacatcttgtgaagatgcagaaaagaaaacaagaagcatagccttgaaagctacaactttgaaagttgaaaaggaagaggaaacaagtgaagaggatgataaagataatggaaacttagtggtgaaaaagttcagcaaatttctgaagaaaaacaaaaataaaatgttcagcaaagggaacaaaaacagcaataacaataacaacctcaacaagaagattgacaacaacttcacattctttgaatgtggcaaactgggtcacatcaaatctgagtgctcaatctacttgaggaagcaacaaagtgaaagcaagatgaagaaggaaggaaaaggaaagagggcatacatagcttgggaggataatgagttaacaacctcagattcttccacagaaaatgaagaagctaacatgtgtctcacctccaccatcaatgaagatgatgatgacttgcttagtgaaggagatgaggtattctgaacttgatcaacctattcatgcttttcaagaaatgtatgaggaagcccaaaaacttgcaaacaccaataataagctcaaaggaaatcttagatggcatattgagaaaataactgaattgcaaaatgagatttgcaacttgaaagaagaaaatgaaaaacttgtttcaagttacaaattgaatggatggtgtgtgcttcttcctctagcaatgttgacaagtataagttgcttcaaaaggattttatgagtataaacaaagtcaaggtgaaaaatatatgttgcttttagccaaatacagtgatttgattgatctcttgaagaagttttataagggaaaatgcaacttggctgaaatgttaagtgtgcaaaagtatgctggagatacttttggtttggggtataaacatggatcaaaatcatttggaaaaacagtttttgtacctccaaaacagaagaatcaaaagtgacaaaagaactcaagggtcaatcaaaattctgctattgggaaaacttcaaaatctgtcacttgcaactattgtatgaaaaaggggcacacatcttttaaatgctatgctaggagattctatgtgcctaatggtgattgcatttggattcccaaagtaaaaagaaaggctaacctttatggacccaaccttgagtgggtaccttccattaaattctgatttgtattttgtaggtgtgtctaagagctaggacatcaacttggtatcttgatagtatgtgaatggagacatgtcctttctttcaaatttgactttaaaaaaaggaggatatgtcacttatggtgataataacaaagggaagataattggtgaaggcaatattggagacaacatcaaagcaaaaataaaaaaaatgtgctttatgtgaatggattaaagcacaatttgttgagcataagtcagctgtgtgacaaaggctttaaagtaaatttcaacaaggattgctgcataatttctgatgagaaaagtggtgaggtactgcatataggtaaaagaaaaggtaatatatatatatatatatgctttcaattgatcatgcattattccataaatcttcttgcctaataagtagagttgatgaaacttggctgtgacatagaagagcaagtcacataaacatgcatcacatgaacaaactcataagaaaagatttagtaattgaattacccaaactcaagtttgagaaggacaaactttgtgatgcttgtcaaaaggggaaacaaacaaaaaattcttttcaaagcaaaaacattgtttccacctctagaccacttgaacttcttcacattgacttgtttggtccttctagaacaatgagcttaggtggaaattaatatggacttgtaattgtagatgattactctagatacacttggactttgtttttgaaatccaagaatgatgctttccttgcttttagaaaaatggccaagcttactcaaaatgcgaaaggatgcaagatagtttcaataagaagtgaccatggtggtgaattccaaaatgaacattttgaaaaattctgtgaggaaaatggaattaaccacaatttttcagctccaagaacaccccaacaaaatggtgttgtggagaggaaaaatagatctcttgaggaaggagccagaacacttcttaatgaatcaaatttacctaagtatttttgggctgatgctgtaagcactgtgtattatactttgaatatattacttataaggcctattttaaagaaaaccccttatgagctatacaaaggaagaaagcccaatatttctcatttaagagtttttggaagcaagtgttttgtactaaacaatgggaaagatcacttggaaaatttgatgctaaggcagatgaagcaattttccttggatattcattgcatagcaaggcatatagagtattcaataaaagaacaatgtgcattgaagaatctgtacatgtgatttgtgatgaaactaatccctctaaggaggaaaaagagttggatggtgatgcaggtcagctggaagaagtaattgaaataggcaattcctcaaccaaaattgaagaaccaagagctgaaacagaatccacaacccctgttcaagtgcctaaagattggagaacaacaagagatttatcacttgacaacatcataggtgaagtttcaaagggagtatatactagatcctcattaaagaacctatgttgtgatatggcttttgtttcacaaattgagcctaagaacattgatcaagccttgaatgatgaacattggatgcatgcaatgcatgaagagctcaatcagtttaagagaaatgaagcttgggaacttgttcctagaccttcatctcttaaacccattggcacaaaatgggtttttagaaataagcttgatgagagtggaatcatagtcagaaataaagctagattggttgctaaaggctataaccaagaagaaggcatagactatgaagaaacttttgctccagttgcaaggttggaagcaatcaggttattgcttgcatatgcatgtctcatggatttcaaactttttcaaatggatgttaaaactgctttttaaatggatatattgaggaggatatatatgttgaacaacctcctggttttagagattttaaacatccaaattatgtttacaaactaaaaaagatactttatggtttgaaacaagctcctagacaatggtatgagaggttaagcaaatttttgcttgaacaatctttttcaaggggcaatgttgataaaaccttgtttatcaaaaggcttggaaatgatttcttattggttcaaatttatgtggatgatattatatttggttctactaaccacaagttatgcaaggatttctcatcagctatgcagaaagaatttgaaatgtcaatgatgggtgaacttacattcttccttggacttcaagtaaagcaaatgaagaatggaacctttcttaaccaatcaaaatactgtcttgaaattatcaagaaatttgaaatggagaagagcaaggatgctgcaactcccatggctacatcaacatatcttgattcagatgaaagtgggaagaaagttgatgagtcaaagtacagaggaatgattggatcattgttatatttgacagctagcagacctgatataatgctcagtgtttgtttgtgtgctagatatcaagctaatcctaaagagtcacaccttattgctatcaagagaattctgaaatatctcaaagctacaccaagagttggtctttggtatccaaaaggtgcttctttaaatattattggttactctgactctgattttgcaggttgcaaattagataggaaaagcacaagtggcacttgtcatttgctaggaagctcattaatatcatgacattgcaagaagcaatcttgtgtggcattatccattgctgaagctaaatacatttcggctggaagttgttgtgtacaaagcttgtggcttaaacagcaaatacttgattatggagtggaactgaatgctatttctctgctatgtgacaacacaagtgctatcaacatatcaaagaacccgataatgcattcaagaacaaagcatattgagataagacatcatttcctcatagattaggttcaaaaaggtaacataaaggtagaattcattgacaccaatcatcaactagctgatatattcacaaaactattatctagagatagattttatactcttagaaacatgctagggatccttgatgaaagcaacattatctagcctgttttatgtgttttatgtgatgattaaagcctatatgccacataatgaataagtgtttggatcattgtcaaaaagctgctaaaatgctctgcatctgatgtattctctgttgtaatcgattacaccacgggttaatcgattaaaatcattaaaaatcaagtttggaacgaaattagtactcatgtaatcgattacacacgaatggtaattgattattcttcacatttcagaaatcacttacctctggaataatcgattacacatcgggataatcgattacattgttcaaaattctaaaactaaaagcataactcactgtgataatcgattacataagagttgtaatcgattactgttcatatcagaaataactctcactctgtgataatcgattaccactcgggataatcgatcacttatgacctgatacttgtatgattgatgcaagctctggaataatcgattactttgagaaagaatcgattactggtcatcttcaacctcaggtcaagaatgaaataatcgattacttataaaactaatcgattaccatgtgttttaaaggtgcctaattgctctggaataatcgattacattacgaaataatcgattattcatgttgttgtatgaaatctgacaggttttaatggaaaatctaactgcccaatccgtttaataaccaacccaatgtcattaaactgtcaccaacagctatatttttgaaattatggacgttaagtgactgatttgtgcctataaataagtgattatatgccttagacaatctgcacctattctcttctatctctctcattttctgcaaattttctgtgtctaaactttgtccaaatcctctattctaaccatgtcaaatcctatacccaagagaactagaaccacaaagaggaaagctggtgagtcttcctcaaatccccctgcacctcagccaaccaataggttagacctatggttttcatccgaggctaataaaatgaactatttgcagttcaatgccacaaaaccagtggccacccctaaatacattgaccttgactggtttattaggcaaggattccagtttccagcctacttagagtcccaaaaccttaggagattcttagaaatgaagggtactttctaccgtgatcttgttaaggtattttaaacctgcttgaaaggctcaatgcagggtgacatgaggtcaaaggttaagggagtaaccatgcatattacttctaatatatgggaaacagtagccggggtagtctgtgagggagcccgtagatttgatgaggatccagaagggtatagcaagatggacacctacagaagcatgcttcatgatcctcacatgaggctaaggaccagacttggcacaggtcctatgactgctgaggataggttgctacactatttgatcacatacatcatcactctaagggccacaaaccatgcccaagcaactgatgaggatcttcagttggtgtatgggctgaagcatcacattcctatgaactgggcccttatttttgaagaaataatgctgaaatcaaaaaggttggtcaattacccattcccctacccagtgtttgtgtctaggttgattgatcatttcaacattgatgttgaaaatgaagttgtagacaacacaaactcctacaacagccaaattaaggagaagcacttgaccaagatgggtatgagaaagacacccaatggttgggtgatggcaaatcagatggttgaagaacaaggagaaatggtggctgattatgatgaagaatagcaacaaccacagcaacaacaacagcctgcacagccagtcttcacagactttgaatccttgatgattcaaaggatggactccatgctgaagcttcaagaagacttcaaggctaaaacccatgaagccttagaagacattagggaaaggcttgactcaatagaggctaacatgaatgatcaagcctctgttgagttctaggattgtttagatttagttaatgtttgttatattttctagttaaactatgttctattctgtttctttaagtttattttaattcaatattgtattgccccatatgcattgatattaatgaaatatgcttttcaattttatattcgttgtgcctaccttattttttgacttttaacaagccaaatagggggagaattgattaagggggagtgagtttcaaatcactctgtttgcccctgttttctggttcagttttggccaaaatgttgatttgaatgagtgctggaatttagggggagtagttgtgtaaaattaaaatcaatcaattggtatagtgcttaattgaataattcatgaattacatgtgctttaacatttgtttcttggaaaggtattgaaagcttacaggttgaaagctttacaggtttataaatcttaatgttcaacaatggcttttcaaatttatctccaagtatctgtgcttaatcaaattgaagatttggcatgtttaaatccaaaaagggggagattgttgattcaagtgaagccatgtgcaaatgagcaaggaatcaaggcttaagtgttttgtgctttcaacatgctcaaggataaaagttccaagaaaagcttgaagaccaatttgattattgtaaaagggagtttatgatctgataatccaattgagcatattatgcatgaatcattcatctaggattgtttgattaaaggtcttagtaaaagcaattaactagaaaggcatttaacaagcaaagtttttggaaaaaagaagttctactatagtaattgattacttaagtattggaatcgattcttttgttcttcgtgccttttagaaaacaaatcaagaacatagtaatcgattacatatcgaattaatcgattacataggccaaaataagaaaatcatactgactgtcttaatcgattacagatgggcgtaatcgattacatccgtgcctatggtaaacatgttctactgaggtaatcgattacatatcaaattagtcgattacatagttcatttgaaaatatgtgcttgactgtcttaatcgattaccatagtcagtaatcgattaatcaatgcatttagaaaaacatgtctgtctggcttaatcgattacttcacaaaataatcgattatattgttcatagcctaaactcagaactcatcaggagcactttaatcgattacattcttgaattaatcgattacatatgcgaaataatcgattacaggagcgtgtttaatcgattattttcagttagaaagttgttataaatagaacccactgctctgtgttttagtgacttgagaattttgaaatctgagcattcacaaacattcacaagctttcattagtgactttctgagtttcaaaaggcatctgggcttcacaaattcatatggttttttgattcaaagaagtgaagcatcattgttcatcaaagcataaggaaaagaatgcattgagtttgtaatctgtcattcaacctgttgaatcattcatttgcatgagttcttggattatcaggtgatatctttccttattctttgaaggtgtaaaactgttatttgaatttttgtaaagattagtctattgtaaatgagtttcttacatgtttagagatagtgtttctctaaggacagctgagtagtgttcttagtgtgggttttggtctctaagggtctaatagtattttagactgttgaactttatctagggttgataaagagaggcttgtaattgcttgtaagaatatttttgcaatagtggaattatactctaatgttgagtggaagaactgaatgtagcttcatagtgtttgaagtgaaccagtataaaaatctgtggctaatctttcttctcacctattcatctcttaattgctttatttgtgaatcaatctcattgcatagaaagttatactctattttctattctttttggaaaaggaatttgattgaatattaattcttggttttgaaacaatttttaaagtgataaagatcctatgataactctgattttaaatttttaatttaccaagattcaaccaattcacccccctcttggttgtgttgaagtattctattcattttcacttctctccatccccatatgttttcactagaatatcccatgcttccttcgacgtggaggctttggagattttgttgaatatcttcgaattcacacattggtagatgaggaaccgtgccttgctatcaagtttctgctgctgtttgaagatctgtttctgctcatcagaggcattcctgcttggttctgtgaagccacttgtcactacttctgccacttcttggaagccaaagattgccatcatcttgatccgccaattatcaaatagtttgccatcaaagactcgaaaagatccttgaacgaaattgttgtagcctgccatttctgcaccctgttcctttcttcaatcacaatgcagtacacaattggttcttcattggttgttcttctatctaagaacactcactcagccacaacacctcacaagaaaatgatggagaaagggacccaatacacatgacttggaggaaaatagaaaatatctctcaagaatctctcaagaacacaatcaaagttctcaaactaacattcctcacaagttttggatctcacagctcttgataccatgttaacaatcatttgaatacacatgctacagaaagagatatggaattgcattgatagcagtaacgaaaaacaataccagcagtagcagccacttacaaaatgaataataactctacttatatagcagttttcacatgttgataaaagccactaactctaataacaaagttatctaactaactttttaaactttaaattatccttaatagattaatggtgtgagagtaaagatagatttacaattttaaataaatgataattttattttttgttctttttaataggtgtatttaagatttattggatgcataaagaaaacccccgaacctatccttgccttttgcgggcacgggaagaagagagccacacccgtcccagccggttgccatccctaatttactactcacacgcacaactgctatctgctctctccacaccgcgcagcaattcctctcttccctctctgcaccccctccatggcggaaccaatggctgtcgattccaatcccgaatccggtctcgacttcgagtccccgttcgcgtggggaagaagcgaggcatgggaggcaaaaagaagaacgtgcagttctacgagtcgttctccttcgacggcgccgagtacgtcataaacgacgctgtatgcctccagagcgggatcggcggcggcgagccccacatcgggaggctgatcaagatctgggagacccgcgacaagtccaggaaggtgaaggtgcagtggttcttccgccccgccgagatccgcaagtacttggttgggatcgaagtgaagccgaacgagttgttcctcgcgtgcggcggcgacggcgccaagggcttcgccaatgtcaatcctttggtatgttttggattcttaatctctgctctgtcgttttgaggattattggctatttttctgtcgttttgagtgtttgcttccaatactttggtaagtttcggattttgaacctgttttctggcgttttcaagtgattgccattttctgtcgttttgagtatttctttggctgtttttcttatgtcgttttgagtatttacttcgcgaatactgaacctgtttctgtcgtcttggtaagttttggattatgagcttgttttctgtccattagatgcgttgctattttttctgtcgttttgagcgttggacatttttctgttgttttgagtgttggacgtttttctgtttgttcgagtgtttttgtccaattgtttttagtattgttggatacttttgtgtcgttttgaatgttttgcttgttgtttgcaccaggaagctattgtagggaaatgcaatgttgtttgcatttctaaggacgttgggaattcgcaaccgtcagatgaagcaaaggctgattatgtgtactatcgtttcttcgatgttgtgcaattgaaagtagtggatcagatagatgtcaaggctgctgctggaactgaaggtattatgtgatcttattcgtttggaatctgtgctgtaaaatttttaattgttttagttttgaagtagtttttttttttttttttgataaaaaattcaggggatttgtctcacttgacttgacattctcatttgaattatttttattactcttgtggtttaaataattatctaaaaacttggattttatggaagaaaaaattcacaagatttggtatggcattctgccatggtgttttacaatcaaagttaggttattctgccatgatattttgcctgttgagttgttttgcttgtgttttgggtttcccaagtggtgcccctacttccttttgagatttaaatccctacattgtagccaaagtttgttgacatgtagctctaattgccaatttagccacatctcttggtttgaaataagaatgtttagctgtcacatggagagctataattcatgttttcaaaatcgagtttttttgtttaatcagagtgtttcagtttttaatatctcaaaaaattctgttggttaaccataggaaatatgtgtatttctatctagtgctgaattgaattgctgacaatcagatgaaatgtttttcacaacttgttgcagttaaaaatgtttccaacaaatgagatagttaaaagcatgttggtgctgtgaaactcggtccaagacaagatagaagttagtgggaatggcaagtaaagtattgaagtagatatttcaggttaaaaaacagagttagcctgaaattgaaaaggtagccggcaaatatgttgatgtaatttagttattatgttctacctcccgccaaaaatcaaaagttataccttaataaatataagtctagaagtgcttttgaaagtttttctactggaaaaagttctataagtagaaaaactctcaaaaacacttgtagcttgtattcaaacaggtccctaagctattacttctgcggctactataagggtctgtttggacaagcttctctataagcacttttaaaagaaaaaaataagaaggaaaaaatgaaatgagcttcttcaaaagtaaaaataagttgtccattagttaatttttaaaagttcaccaatatagcttctttaaaagatgagatgacatctacaaatgagttaatcgaaaactcattttagcttatgaagaagtttatttatttattttttttattcttcctctagaagtgtttctagagaaatttacatcccaaaatgccctaagtcatttactgttgccgcttagatttaggagtttactttattctgtagacatgtagatgtggtgtgtggaaggaaattaatactaaaatcctttttgatatctcgagtgactaagaaaaacattttacagcactaatgtataatttatccatatcgggagtaagattgtgaattaaataagtggaactaaatattcgaggaggaacaaagaataaaagggcgttaggaaataaaaaggaatgaggtaccttgttattgagaagactcgaacaagttcttttaagtaatgactctcttttttgacattcagatagctttgtagaagttaggtgcatttgtgtcaacacttcttttcttttttcatctatgcacagtataatcttgcttgtgttattatttctgtataagtgcattcgtattaggatactttacttcgatatcggtcttatttggataacttttttaatgaatatttatagaaaaggaaaataagataaattgaataaagtatttttttgcataaattaaaataatgtgtataaattaattttaatttatgaaagaaatttacttttttatgagcattgtttgttttaccaaattttataatatttgttaaaaaaaattattcaggactcttgttttgagttgacaaggcatttgcttgttttgaaaagcttcttttaaattagggcatttgcttcctacaccagtgctttttctcatacatccagcatatacagtgtaataccaattttacccttctcgtaagtcgaaaggcaacgggtgtatgaatccataaagattcatacggattcgcaatccgtaaggttacattacggattcgtaatccgtaagagtaatcttacagattcgtaatccgtaaaagtaagagtacggattcgtaatccgtacgagttaagattttttaaaatggtttttgaaataatggtccaagtagggtgtcaaacccatgacctttggttacgagaatcgtgctctgaccaactgaactactagaccattcatgttaaaaactaattaaaattgctatatataacattacaaattttaatgtatatttaatacacacaaatttacataattaatttttatctaataatatttttgtacatatataaatttttaatgtatatgaacctctgattttataaaattaaaatttttaatatatatgaacctaatatttttttattcaaatctataatttttaactaagtcatgatttttattttaatttattgttttcaaaattcatatattttataattaaaccatgattttatttaataatatattttttatctaataaaatatatttttctaaaattaatttctaaaattagatgaaaaaatatattatcagataaaatcatgatttaattataaatatatgaatttaagaacaataaattaaaataaaaatcatggcttagttaaaaattatagatttgaataaaaaatattaggttcatatatattaaaaattttaattttataaaatcagaggttcatatacattaaaaatttatatatgtaaaaataatattattagataaaaattaattatgtaaatttatgggtattaaatatacattaaaatttataatgttatatatagcaattttaattagtttttaacatgaatggtttagtagctcagttggttacagcacaattcttgtaaccaaatgtctcgggttcgacacttacttggaccattatttcaaaaaccattttaaaaaattttaactcgtatggattacgaatccgtaaggtaaccttacggattataaatctgtatgaacctttatgggttcatacacccattgcctttcggattacaagaagggtaaaatcggtgtatgagaaaaagcgatggtgtaggaagcaaatgccttaaattagtcactcataagaatgaagaggaaaaaaaaaaaaaaaaaaaaacctttcattacaccactcttcaagcgtattgattttcctttatatttcaaactagagtcttcgaatggtcctacaactaacttagaatcccagttatagccgatgttaaatgtttccccggcactactgtcatgaataaatttcaaataaagaatgtaatgtggtgttaacactcatcgtattacatataaattatacttctcttataattttactataaaatagatta

SEQ ID NO: 38 - DNA, 598948 bp, Glycine tomentella
atatgtgcatgtaatttaatagaaagaatgttgaccataatgtgcaactcacgtaaagaattgcaagactttaataggatatgttaaaacatgtcgcagcatgcaatgtataaatataaatagttacaacttgttcacgatgtgtgcctcaagatttttatgagcatgaactcatttaagaatcgatctcccagctcattaaattctgttttctgctttatattgctactttcagcctttacagatatgttcattccatcaaatactgtcatgtcaaatatcatccatagagcgttaaaattctctcttctctttgccacgctttagaatgtccgaaactcttttctatccttgtattccagacaggtgagttcaccattttatcactttgcctttctaagaatcctttttgtccactgatgtagaaagcctatggttgaaattcaccgacataaattgtagaattaattaaaacatgtaattgtcttattcgattaatttttccagttgaaagctaggtcaaaatagtttttgtttttggtctagaaagttggttcaaatagttaatcgatgagttggtaactcagtattgggtgtaatatttttttttatcacatcaatgttaattattaatttctgttataatattaataaaaaatcaaactcaccatcttttttttttgtttcttcaaccgttaaatctccttctcaatcacaagccaaccttataattgcattggatataatgttataacttttctcatcacatgctcccactttcaattaaacaggaggaatattagagaggatgatgattaaatattaaattaactgtaacatttgaaaagttgcatatcttaaaagattggggggattaaaattacagaatttaaaattgatggaacaaaattacaaaaattatagaagaaccagagtacagtttaacttaaattttattacaagtaaaatatttttaaaagtataaatttgtcaatacttaaacatattgtcaacgactctatccttattaaaactcacttacataatgatttggcaatgcatgattaaacgctagtgttaagaaaacaaacatgttcgctgctaatagtatagttcaataattgtttaaacttagaaaataaagattgttttatcaagaattctctctctctctctcaatggcaagaagtggcaataataataatagtaataataataataataataataataactccttaaaaaagaggcactaacaagatccttcaacagaaaaccatcacaaccattaagtgatttatctagcaatcgaaccccaattctcaactaaaatcatgaacaaacttagtaagtcattcttcatcaagaatattaacgaagagaggtacacatgatttatatttaattaaattgtaaaaaaaactttatgtaaaattaaagttttgtttgactttttgtcagccattcaaacactattaaagtttgttcattataatgaaaaattatgatttatttttcattcaaaatatataataataataaatagaaaaaaatagatgcacattcttgaaataacaaaaattttctttaatagtatgaagattgtgtatgtatccacctagaccaatctctattatcaattatttgatgagtggaactctaaagaataaatcatcattctatttttcatgtctaaaattaagttaaattttttctagtttgtgtctagtatagtttatctcaattaaatgcttctatttataatgttaaagagatatggatatgagtctttttcaaataggagagattttattttaaaaaatttcatatctctttatctttatatttgaaaataaaagttatttcatattttgttatcttaagaagttttctggtataagacaatgataactctcaaataatcacatgactatttactacgataaataatcacatgatgtgattctgatatttagcgatagaatctaattcttattttatggataactttcacatttataaaataatactttttgtttatattaattatttttttggtgctaataaagaatacaataatatttcactaaaatatttatttgattaaattatctaatttaattatcaaataaattattttctcttgcaaatattgaaactctcgtttatgtgtgacctcataagttcaataataaatctgtagtaaattaattataattaatttactaaccaaagtagacttctaataatactccttagcatccaaataacatgaagtaactttttttttacctttaagagccaatgaaaaaataatgaaatgtttcctttcatcatttacagctcaagattaattagtatattattactttcaaactctaataagttaacacattatatttaatcaatgaatgtcttaataatacatttatccctaagagttcatgtgtactcgaaaatctaatttacaatcattttgtttaaccttttttttcctattcctttcacccctcttttatttttgcttatttttctcttttgtcttatttctactttttccttcctctctccctttctatttctttgttttattttcgatctatcattgagttcatctatcatcgatcccaattaacttgaattaaaggtagtgttgatgttaaaatgtttaagtgcatgactccaaattgacagtgaagggttgtgaacttcttatgcattcagggattgaaataataccgccataagttataagaggttaaaaccaaacagaacatttcaaactatcctaactaaatttaagcttcagaggctagacattgattgctgatatcgttactcatcagaaaattcaagcctcaggtcttatttcaaacagtatcactatttactcaacttaaccaaggaatctgaatagcatatattttggactaaaatatgaatagcatttatgaacaaatgctttctcatagaccgtgtcagctcaacacaatgtttaacagcacttcaagaacctattgtattggcttactatcctgcagaaatttaattttcctacaagtttccatagcaacctattcagaaactacactactatgaaacagtatgttggtgtgccactagaaataccacatatagttataaaaatggaagctaacagttttagtacaggtttaaacaatgattaacataattaactgaaaacatccatgaatacaataacccaataaaccatcctaaaaatgctgccatggagaaagcagagggaggggatgaagatattgcaaaactagagcaagccatccaccagagagcaattaacaaagcgtcccactttagatttagcatttcttatagtttgagctatcctagcagactcatcttgtgttctagctagtgtctccttgcaagaagtctctttatcgtatattctatcaagtaattgttggaactttgcttccagtgccttcttctctacctcacaacattccaattctttcttggcagattccatagcctttctgttcctatctttttcctctttcagcgtgccagactgtttaagaatatgctttgcctcaagtatctcttctagtctcaggtgaagccactcaatgttcactttcatatttttcatttcatttgcattaacaatcatgttatgcagctcatcgtctctgattttaatcagacccttgtcttccaattctgagaggatgtcacctatcacctctaagaacattgatcggaatgtcattgttgataccatagaattctcaaaatatctccatgcttactgagaattttcttaacatgggtatgaatttcggcttcacttggtatccttcaactgtgtccttcggtgagcttactccaaaaaaattaacctcatcaccatcattagcccacatattaaccatttcagtaatgttgagactgaaatgtgaggatgtatgtccaaccattgaaatagacttgctattgttcttgtctgctctttccctagagttagaggattcttgaataccctcagcatccaaaggtttaagctcaagaggaaccatagggttctcagcctcactccttcccgccatttcagctacatcaactaaccaattctctggagcaacaaaatctccaaccttttcaatctcttcatgtctgatttctggtgccaatgtgcaaggttgaacaacttgtcttggaagggattctggttctgctacagaacattgtggaagttggtaagcctgcacaaatgttgttctagtttcagtaaacttctttgctgatctcaaagaggcacaacgagcatgaactacagtgtaatctggaacttggttatcctgcacagatgttgtactctcaatattcttctttgccaatctcaaggaggagcgggttttagaaatgacaggggaatcttgaatcaaatgttttttcttagaaggagggcagtcccaagactctgactgaacatttaacacaggccaacaatgtgcaaattagaactaaaccattgataagggtaagagagaaaataaaaaaacaggtcactgcacatccttttattatgttactgaaaaattcatctgcattttgagtaccaaaagtacaagtcttattgatccttcatctctccccaacaaaacataaactttttagatgtggagatactaaactaaacatttctgttttagtgcaacaatgagtattcacattgctcaactttcaagatggcagaaaagaataacaaactagtatgatggagaaaaatcaacatagtattcatatttctgtatcctacgagccatgcagctgctaatgaaactagtattcggtcctcaactttaataataacagagaaacagatcaaggaaatgacattaaagtaacttttcacgtgtgatggagcaaaatcaacctccacggttccacccttacaaacagcactcaagtttttcaaaatatttagaaacttgctaccacaatcatgtacttagaaacacagcaaacaatatatcagatagagagagatttttgatttgttaataggttccccaacctcacatgggtgaaaatgagaagtagagattatgattatattccaagttcacgtttctgccattttatttctacaaaaatgcttccattggaccattttcattctttgttgaaaacaatcatcgtagccacaaatatgctgcatcatttggaaacaaagtggataatagaattagcatgtgtctgtgttacatacctggctggattctgccgtataagattgagaagaatccatatcccggcttgcttccccttctttttgttgttgttgttcttcttcctctaggcatatttagtgtcaatgttcttcttactaaacgtcaaagcaagacacttgcacagcacgggtccggaactcaaacccaaagcgcttccttattcaaactctctctctgagaacatattaattcaaacttgtctttaaccaaaaaacgtttatacttagtaccatctttatgaatgtatacacaaaaaggtaaagagtattaagtgtatgtatatatgtatcgttactctaaaagtaagaaagcaatcgttttttattttctcagtttgtactagagttttcttcctttttgtgtgataaaatgtttttcttatgccatgggaataaaatctgtgttgtattgtatcttggaccaccacacactgggttaaatttgaggagattgattgaatttgagttgtcttaattacagttacacttactactcaactaatggtttcctatatataatataattgaaacaataggtgactaatccaaaaaaaggaaacaataagtggcatgccttatttgtgctgcttgagaaattaacatgggcttgagaaggatttgactgggttataacttataattcaccttgtcatttgagtaaatttttagcatcaaagcaggttttaaagcttatgctgacattccatcgctgctatcatagtcttgtttaaaattgttgaaactttatgagcaatttttatgtttgagttatgatataattaatataggttattaattttcactttattctttttttattaacaaaaatgtaaaattatcaattgaaagttataatatagtaatttcaatgtcttaccatatattaattcatgttcttactattttacagcattgttattttctatagaacattaaaataaagtttaatttttttaagaatggcaatatttacaagtatcgttaatgatatttcataaattattatatccattttaaagaaattatttttaataaatttaatacttctaataaaatattaaatttcttttaattagtatttatttcaggatctttaattctagaataataaaaccaaaactatcaatatcaattttatactcactaaaactcaaaattgtgtcatattaatagaagacttattaaatgctctacaaaatatatatttttaaattacataatgttactaatgaattaattacaaatacattaaatttaattatctgatcatttaacttcaaagaaaaagtaatatatatatataagtgtgaacacctatttttgttcatctttaatttatttttaaaaaaataatcattctttcaatttactgtgtttgcttaaacagatcccttttttgtgttaattaaaaaaaattattttgtctatccatttctaaaagaaactaaaataaaatgtttaagaaaaaaggtaagataatagtaataaaacaagagagagatatagaagaatggagcagcatcttaggctggagactattttcagttttaggcaaacgcccttttggcttgtctttgctttattattatttgttttttatccccattttttctcacacattcactgttgtacactcatccactcttcctgctgacatgtcagcaacggcaatacagaacttgtctctgaatacaaacaaaacaaagaccattctaattttaacaaaaaagaggtcaaacaaaatctgaatacaaaaagggtgagaggttggaaatgtgaatgttttacctaatccctgccttttgttttctgtcttattttcaatattgtaatcttgcggatgcccttgatatatgtagcattttattttatgcatgtaataatgtgataactaaagagccacaaagtaatcttagatattcaagcaatgatgcgcttgatagcctaacatatcataaacattcaaattaacgattaacatgccaaatttctaacatgactaacacaacttaaaaacatatcccttattaattgaaacacgattccaaagaaaaatcatcgtaaaatagtacaacgcaaggaaagcacaagcttcagaagccatgagagaaatagttttttttttttttaaaaagggccctttgaaagaaatagtagtgcttgtttaggacttaagtcaacatataatctgaatgaaccaattgatttgggtatggacaccaaggaaacaaccaagttggctctggtaatcacatagaatatgttttatgccctttcatgactagtcctcctcatatacatcatatgaattcaactttatagtggaaaatattaatttcaattaaatctttcaatgctaaaaaactatacttttgaattagaaggtaatgttccagcattagttgtcccattgggtctatggatatggtaaatgagaatgtcaaaaacagattaatcaatcttaattcttaaatttaattagaaagctaagattgagattaaaagagtcagttaaatattgaaaagtactaaagagatttttttatgcacaaatattaattgttattattaacatttttgttaatggaagaaatcatacctactattttttttttcctctcttcattattcttttatgactcaaccaatcttataattctaaaatctaaaagccaatgatactctcataaatattatatactcactctatatcataatcctttaccgatgcattcaatgttgaatgagattctagtaaattaagcaaggggtagggcatataggtgggttcaaacaccttatttatatgctccaatcgtttagattggatctcaatctcatatagcaggcacgaaattacgcaaatggccatgttcatgaagaataaacatgacacagatggtaacagtgaacgggtataagttgtaaaatgtaaatagctacatgtaacatactctgtcgtccgccccatgccattttcttttagtcttttctctatttccctttagatatgtccagtttgagcatgatagagaactgattcaatgcagaaactacccaacaaccaaaaaataggaggtaatctaacagcagatgatgctatactttttaatctcatgcttagattctgaagaccatagtcttctgaaattcttatgctcagagaagtactaacatttgtaatttagccaaaattgaggataattaattttctacttttttgaatttatcttctgcgtgtaaaaaggaaattaataaaaatatttaacattaacttctcccttatctatcatattctgtgcgaattaaaaattaaagatgaccaaaattacaattttaaaaacaataaaaaggcaaatttcatgtcacctactaatttttaacatccaatggaaagaaagtttaaatttaatctctcttcctatcactttcttttccttctcactccatgctcccaacaaattctgagtggttgttggaataaatgatggcacagaagaggaaggtagaagtagaataaatattttgtttctatgattttaacaaagaaagaaataaagttgagtatgaaagacgtcttgaaatatgtttataccaacagtttgacaaagaccaaggtcaaaatttgaaaaatgttaatgttctcctatacaagaaaattcttaatattgatgtattcttggtatcaaaacaccaaaggcatgatcatgatcatgtactgtatatcctattgcttttttgtagaaaaaactagtgaacaacaattgagtaacttctccctcatccccaattaactctaaataagagattatttctggcttctcttctcagttcttagccattcagaggcactgctttctttattaaagtagggttactcttctcagttcttggtggaggtttgctcattcaaccttggatattagttactgaatctgaaatctagtgtacctagagtgtctcaagtttccttatagttttaaagcaagaaagaaaaatgagtttcagaatccgaaataacaaccaacaaactagatttctccgaatttaaaaattttaagtatccccaactggtctcaacatgattttgagtgggaaacccagtggccagaaaaacaaaagattaactatgttttttatacttaatttttttttttttttgagttttcacttttaattcttgaaaaaaaaattgatcagttttaatttctaatgttttcatccatccatagttttagtatttaccattaagtttttttaataagtaataatatgaaactatcataatttctggccgtttaaaactgacaaaaagcctgctaaagtgattaaaccatattaagcaatctctgaagggttcaacgcaacgctcctccaccacgtcgccgtcaaaatcgacaaggagagcatcaaccaagggatacaaaaattgaaactcagatctgaaacccaaaactcagatctgtttttggacctcgaaacccaaaaccattatcagatgagtcgtaggaagctttcgcctctgccatccgccgctgcgactcacggtcaaacggcgccgttttgcaaacccgcccctcccctccgccaaacggcgccgaagatgatggcgttccagaggacgacgtttcagtgtgagggagggatttggagaagcgagtgcccgtagaagtgaagctgattttggacctcaaaacccaaacccaatatcagatttgttgaagagactgatccatagcgagaacaaatcaaaacgaatcgaagaaggagaatcaataattgcggaacacataacaatcttggctgccccgtagcgagaacaaatcgagatgattcacaactttgaatcctcatctcattagatgaacaattaaaaaacatgcagagaaagcaaaaacaaaaaatagaatgagtacgaattagctattaggagttgcccacattcaactattctgcatgtcgtatatcccttcctttcaaatccactaaacatcaaactttaaaagattttatgtaaagtagaaactgttgcttaaattaatgaaaattcaattaaaaaaattattatagcaatttgaaaaatataataccaaaatttcaatcaaatgaataattgtattttgagtctgacgatattggcatctcctgaagcaattaagccgccagaaaatagtttgctacattttaagcctttgttaaatgctgatgtagcactaattttattattattttaattacagtttatgacatttaatttttttggcgatttaatggtaacgacggacaaaaacattaaggaataagactggtcaaatttttatttagggactaaaaagatagttaaaaaaaaaacaacttaaatacaacaataacatgaccgcaggaagtcacctaaatttggctaaaattaaaaaataatataatttaaatatttaattaggaaaagggtgtaaattttctaatatttagcaaaatggtgcagccaaacacacctagggttaggcgtgtttaaacacgcccagaatggggcgtatttcaccagatggtgacacgtgacaggcatgaagaggggcctaggattttcgcggtgtttttgtaaattacgaaagactataacttttaactgggacgtccgattgataagaaaccggcgcccacacgctcgaaattgagaggagaaggccaatgcaagtccccttgcccaaattttttttccaaacgaagcctctaagtgcctcaaaattacgatttaagtttcggagcctcaaaaatttttttgttttctaatattttatctactcaattagtgaattgcaagctattctttgtttatctaattacttgtcttaatttcgagccttctgacataaaatacgtcatcatcggacattgctacgagaaattccgactgttcaaagttatatgcatcgtcaattttgcagtataattttggataatttttgaaattatttttgcgatcacaacagcatgattttttaggatttatggttttgggttttgggtttaggtttatggttgaggatttagggtttatgctttagggtttagtggtttcgtgtttggggttaattaatccaaagccctaaaccactaaaaatatacagcaataaccttgacgtacattgtttcaacttgtgccaagttcatcatcatatacaacaataaccgtaatccaacacaaagctttaaacaccctagacctcaggttgattctatctgtcatcatgacaggcgtttttccatcctataatccaataattgttcctaaacagacaactattcctactttggttattatttgtctgtgtttttgtttcacctgaccctgaactatagtgtcaaacaaagtttccaccaatacaatatgtttggcaaggcaaaacttgaattggaaaactaattactcaatattagtgaagtgtatgtaacactcattaggttattcactgccataaaccctaaaccggcacccataaaccctaattctatacccacaatccatattagtgaagtgtatgtaacactcattaggttattcactgccataaccctaaaccagaatctgtcatccataggtctataacccaagccatatgcactaatgaaaacattagacttagttcgaaagctgtaaaccctaagtcagtaaccgacgacctaaaccctaatcacaacatcagacctaaaccctaaaccgaattccataaacccaacgtatgtaacccaagccctaaaccctcatcacaacatcaaccctaaacctaaaccggaatccatacaccctagctctgtaacccaagacataaatcctaatcagaactaaaacctaaaccctaggtctgttcccagcggcataaatcctaattacaatataaacccctaaccttaactgaaatccatcaaccctaatcaccacatcacacctaaaccataacctggcacacacaaaccctaactctgtaccccaacccataaaccctaatcaccatgtcaaccttaaaccctaaacccgatttacatacaccataatcactacctcagggcctaaactctaatcacaacataagccctaataacaatgtcccacaggcccctttgtccatataaaagctggtgaaaatgaaacaagttgtgattcactaattgagtagataaaatatcagaaaacaaaaatttttttgaggctccgaaacttgaatcgtaattttgaggcacttataggcttcgtttgggaaaaatttttggacgcgtggccgccggtttcgtgtcaatcggacgtcccagtcaaaagttatagccttccgtaatttacgaaaacaccgtgaaaaccctaggcccctgttcatgcctgccacgtgtcactatctggtgaaatacgtcccattctgggcgtgtttggctgcaccattttgctaaatattggaaaacttgcacccttttactaattaaatatttaaattgtattattttttaattttagcccctaaatttacattagaatatattttgacaagctaaatatatccatagaaacatagttaacaaaaaaaaaaaaccttaaatacaacaataacatgcctgaagggagatttacattaaaatatagagtaacactagtactccatgtgttttactcaaattccatactcctccctttctgcatcctacaaaaaactccttaaatgtttaactcacattatacctagactccctcttttctagacattgtttaataatctaacacaaattagacacatactagtcctaaattctgaaactaattgagagaggataatttggattttacaataaaaatgtaaggacaattttgtttgctcacatattttaattaacgttagttaacgacgttaatagagagggtaaaagtaatgtccaaaaagggagggatatcgggtgaaatttgaacaaaatatgagtgtaatttactctaaaatatattttgacaagctaaatatatccatagatgtgagcattcataaaagattactcattaaacaatcccaaaatcactacattgaaaaagtagtaaaggagaagaaatggcaaaactaaatcaagccatccgccaagagagcaattaacaaagcgcctcactttagatttagcatttatgataatttgagatatcctagcagattcatcctgtgctctagtcagtgtcttcttgcaagttgtctctctattacaaattctatcaactaatgattggaacgattggatctttgcttccagtgacttcttttctgcttcacaacattccaatgctttcttgacaaattcaatgatctttttgttcctatcattttcctcttttagcatgctagattgtttaagaatctgtcttgcctcaagtatctcttccagtctctagagaagccactcaacgttcactttcatacttttcatctcgtttgcaaaagcaatcatgtaatgcagctcatcttctgtgattttatggagaaccttgtcttccagttctgaaatgatgtcacatatcacctccaagaaaattgaccagagtgtcgttgttgatgccatagaattcttaaaaacatctccatgcttattgagaatgtttcttaatatggggatgcattctggcttcttcacttggtatccttcaaccttgtccatccatgatctttgtccaacaaaattaacctcatcgttccccatattaataatttcagtaagattgaggctgaaggatggatctccaaccattgaaatggacttgccattgttcttgtctgaactttccccagagttagatgcttcaatatcctcttccaaatgttcctgctcaaaagggataaatagggcttcaaatgcattgtgttcttccatttgaactgtgtgattagccaccgggttctcatcctcactcacttttttcatttgagctacatcaacagaatctccagccttttcagtctcttcttgtctggtttgtggcataaaggcagaaggaagtgcaacttgtcttggaacggattgtagttctaccacagaacattctgaacctgggcctgcacagatgttcctctagtttcaataagcttctttgctgatctcaaagaggcatggcgggtagaaatgacagtggaatctggaatcaaacgcttcttggtataaggagggcacctagactctgactgaacattgaacacaggcaacaatgtgcaaattagaaataaaccaatgataagggaaagaagaaaaaaaaggtcattgcacatcctttattatgttactgaaatttacaagaatcaaaaatacattgcattttgaataccaaacccttaacaaaacataaaatttttagatggtgagactgaattaaatatctccgtatttttgtgcaacaatgagtattcacatcgcctcaactctcaagatgactgtaatgattttccttaacatcaagatgtgcatctttttgccacagtttccataacttaacgggtagtagcagttggcaaggaatagggatgggtcatatagtcaaaattttcttgaatcaataaaataagggaattataggcaatctagaacctactgaagaggttttgatttgttataaacaagtaaacaaccgaaagagttgcatggaagctagtacactagtaaatgaagaaattttccttttacactttccactttatgttttgggaacttttttctctcttcaactttctcaagagtgcaaaaggagtggtttaacgcatcaacattttgattcatgcgaagtgaggaaaaaagaaatgtgcattaacttgggtacaatgttaaaagtaaataatataaacaaaaaactctcatggccaacaaacataatagaatgagaatggagcttatgacacaggctgataaatcaagagaagttgtagggacattaaaaaccataagtgtcacggagctgcgattatgattctgtttccaagttcatgtttttgccatttatttatacaaaaatgcttccataaaatcattttcattttttatgggataaatcatggtactcacacaaatgctgcaagattcatgcataatcacagcatttggaaacaagagggtggatggataacataccttacctggttcttgggtgaatcagagtgagaagaatccataagctgatcctgcttccctgtgtttttcattgttccttcttcttaggacaagcacttgcaatatgtgctagaggctgttgtgttgtgtatgatatgagtatgagtctagaggctgcagtgcagtgcaatgcactgtgtgctaatgtactattgcctgttagaataaatctttttcatgctattttgaccacgatatatgcaccgcaacagcaacacttacattttttcaccaaaaatgtacgtttggtctttacgaacctgtgccaaaattggaaaaaaaaaaaaaaaaaccaccaagtatgcaattgtgtttgattggacttatgtgttaccgatttctattaactttttttttctttcactcactctatatctaattgtcacattatagtttgactaatttaagttgagttgagagaattcgttaaaagtctatgaattaactctagagtttaacaacaatagttgctagtgggacatactgtaatttagcaattgttgtgccactacatgcaatttttgcattctagaaaataatacatgaaaataaactggtaaaaaaaacacaatacatgaaccaattgtaactgcatagcttgaattggtcttcatgtcatctacacttcctgcccactcactgtcaacatagacatttagcttaacaactcctatctttaaatactagatgccaaaatttgttgtaccttcaacatatttcagcaccctttttgctactcccatgagatgatgagaacattgtttggtgaactcatgaacctggaaagtaaaatagttggaaacatcaaggctactcgttgtcaagtacagtaaactacccatcaagcttctacatgcagagggctcttcaagtttctcaccatcattcatagaatttctctcactttgtgctagtaaagttggtacttctttgcatgattctaacttacacttgagattgttaacaaataacaacatattttatttgtgaaataaatataactgagccacattggaatactttcactccaacgaagtaaataatgatgccaaagatcagacatctcatatatatcttccatttccattttgaacttggccagcaaaggtaaattacttcctatcacaagcatgtcatccacataaagtgacactacaagttacaaaccacaatcatttatatcaaatatagacttgtttgattttcactcctgaatccaagttggattaagtaagagtcaattatgctatactaggcccttggtgctcttcaaatcataggaatctttggtagtctgtaaactgtgttcttggccagcaacgtcagcctccaggttgaaagattccaaatttgatagttttacctttaaacactggaattttatagatgaattactagaagtagacatattttcatccatatgcctgaaaataaatttctcaacctcactagtatttgcactcaacctctttgcccccaaacacaaaggaagccagctctttataccagttaaatatcagatttgaaaaaaaccaaaatactggaactagaaaatattaaaattgaagaaagaataaaatatttcataaatgagaatgcttatttacgggctcacaaccaatttgaaactcgctaaaaaatctaaactgctgtgagattttattgggattgcaatagctaactaaaacagaaaaataaagagcagaaggtgtaacaattgcaaagactaaatctatccaagatttatttaaaattcaaaggcaaactctcgcaactgtaagcctcttgaacatatctgaaggtgggttaggaatctacaacaaaacaaacttttacagatttgtaagaaaatttgtctttctcaataatgctatgtttaattgattaactgaaaaatatcattcacaagaaaaggcaagatcccaaatttcctctaatttccatcacatgaaattacaataatgaagctctatacaatgcttaaatcttcacacatgcttattgtaaatattgccagtttatataagatgcttctagtaactgctgggattgcaataatttcatgttttcaactgatacttcaaccattttcaagctataaaggtgtctaaactattaagtcatttgtatttaccttttatagttaaaattaatattactaggaaggatcatggatacattaagagaaccaaagatgaaacctgcaatcacagagaatctaaaaccatatggcattatggacaagaaaaaatgatgtattaactttctgcatctcataatttacaacaatgcctttggccagatagcattccatgtctcaaatcatctcttataaaaactaaccatacagaacctacattgatcaacaagaaagctttcacctcgtaaagtttgatttcttctattttgggatgaagtagtaaaagaaatagtgaagctgctggagtgatgaattgatataacctactctattgaagatgtatcactataggaaatatatgctgcaggaaagctactcttcgtagaaattagaaagcaacatatgttaaaaatagagattcatgagtaactgcctcccttttcacctcagaaaacgcctcataacaaataaagaagaacgccagctcaaagattaaatgcaaaatttgcaaaaattggccagaatagcaactatctattagaacttaatgcatgcaaatttatctgttcaaaggttctaactggacttccattcttgcagagggctgtaaatctttatctgcagttgttctggttggactcaagagatcaactgaatcatcttcctcaagattaccaagcacccaattgcctcttccagatatctgccgccctattcgctgcctttcatggtattccaaataaataacaatcaatgcaccaattaaaaaccaaattgccatagcccatctgagtccatggacattttccacatcatatctgtctcctagatgcttcatcccagtaaaaagtgctgcaatgccaaaaacaatggcacatctaccaacaattgtgtggaaatattcccaaataaccctcttggaggatgcctgctccccatttgctggttttggaggccttaggaaagcatttactggctgtatacaagccaacaatatagtagcaaatccaaatttaacatgtgttgagctgaaataaaatcccctaagctcagccacagcaaaaagaagggcaagtagaacaattactaaccctgagtattgcaagtaaacatgaatccggtaccatccatcgcccttgagatgttttagatacctggctgccaatatccctccaggaagcaggataccccatgcaacaaacatcataaatccatgcacagccaaaacaggaagtaaatcctgctccgcctctgctgaaccacgcatcaggtgtacaaggatagccctattacttgtactagaatgcatattcctgtcagtaagatgatcattggtccatttagcacccattgcccaaacaactttgagtggagttgtgggatcaacgatatttttacattctaccctcttttcccgcctacaagatgggtccaagggacgagtaaactcaaaagtaatgatgccattttcggttttacatctcacatgtgtcaaattttcctgcgtggcatgtacgcttgaagcatcctttccatcaatccaataagtgttaacatgtcccataccagtatcatcaatccaacccacatacacatagctgttcaccattccacttccaaaccctatggcaatataaccactttttctctcgccacgagctgcaatagatatggaatcctttgacaatgtccaaaagaaagtaacctgttgatcatccaaaatgacactgttattatacatgtccgatagacccccatcaaccacctcgaccttccaacccatcttctggtcgaacaaggaatgatagtagacgtgatcaggagtgttcctgtcaggagcccaaactaattctgtaggactggcttgaactccgtgggcctctggacctccagcataaatagtctcagtcagatttctcgtggtagcatttccaccaagcggatccgaagtaatataaagtgcaacatcgtgcccggcttggatcgaaaacttgaccggcacccctctttccactctcaagacaggagcttcctttttgttgatataaagaaccttttcaggatttggagggttggggtaatgcattgccggagcagaagaaaccaccaacggaacatttgcatctgcagtgatgagaccttgatcttctttgtcttcagcatccaagggacctgtacactcattcacatgctccgagacattcaaaaccaaatggccataattcacagccccatgattctgaggaagatagtaaggattaatagaatcaggaggcttgatacgccccaaagcccaaataaccttcatattcgctgaatggttcacaggatgatcatactttccatcgaccttagtcaaatgcctgcggtatctgacaaaggtcaccccatccttcctatggccataaaccaacattgaattgttgactaaacccaccccatcagggccttcataaaaggaatcaggacataccccttgagcaactccatcactatttctcacacactcactatacttagtaatgaaaaaatcatccacaaagggcataccatcttccttaaaccctgcaacgacaacatcagcgccaatcatgagatcagaatcttcagcactggaattagcccacccaaaagccatgtaattggtgatcccagtcgcggcctccaacccaatttcaagagaatcctcggacacgttcaaactccacctcaacctgaaattcttagacaaaaccttgcaattctcgaacaccgtcggaggcggcggcgtcgccgggacgtccttgcggagcacgacgtggccgaaatcggaggcggtggcacgatcccagacggcgaggacgttgatcatgctccaggaaacattgctcaacaaatgcacatccaaggtggagttgttgtaggttccgttcaatccgtcgttggaaacaatgaatccggcggtgaggctatcgaaatcggaagcctgcgcaccccaccagtggacgtcggaaccgggaagcatgtcgaattgggaaaccctaaaggagcaatcgtccctgattttcagggatcctcggagttggtgttgaaccatttcgaactccaactccgaattgacgacggagctgaggcgagtgcaattgggagcgggatccgcatatacgaacaacaacaagaacaacaagtgtaggatgaagatgagggatctgcgaagcatgacgggtgcacttgttgcactgtcacgcaaattctgtggatcagaatccacgatgaccaaaccttcaggatcggatcgtaacaatgttctgtgtgcgtggcggaggggttcagttaaggtagttcacaaggttctgtcagtcttcgggtggagagatgactcaaatctagtcaatggttgttgtattgtatcacactatcagttgatggatcctgacttacacctcaccctggtgagccatctacgtggattcataaatcatgatctatataatctataatttatttatgatttattttacctatttttaacttcatatagttattataaaaaataacaaattaactatacataatttgtgagtagatttacgctgtcatatttcttcatactaataaaaaaaacacattgtcatgtgtaacattttttttctgaaacattttttaattatattattgattattcatcaattttatttaaaattaaatataatatcattcaaatcaatgatttattgatatttataaaacatatttaatgaaatataagacgaataaatatttattatttgatcaatcatatatattatagatgatcaaattaaaacatatataaagaatttttttataaaaaatatacttttttaaacaatcaatgtaatattaaatcttgattatttatgaagatatttatcataaattaccaatataaaaaatataacgacatgtgattttcttaaggaaatgtattctagatatagcacgcgagttgttcttgatggttactgttttataaattatcaacacattaattggatttacggtaaatatattgaaaactagtaaagcctaaattgtctaaatttaaaatagctaataaaacctaaattttggcttacttgctttatgttatgcagaaagtcgacacattggtgaaaccttaagcaaacaagtttaatgtcatgagagaaaacaccaaaacttatcaacaatcttcattcttccatggctagctttcaaaggtggaatttgattctcttaagtccaagccacttccaaaatggtcttaaaaatatgttctaatggagcatgaacttacttacatccaagaaactcccataagttaactcaataatgaacagttcaccaaagtgaaagcaccaaggtaattggtcttcaccatattgcattttaggagactttttttcaagggaaaaaaaaaatcacatgttgttcctaaatctattgacaatttatctaaggatcatgcaaaatatgcatatcactcattgaacatcctacaccacatcggaccgttttttatgaatagccctactcttggaattgaatactagatcattaatttccacgtgaccacatcaatgtttagcatgtagaactttaacccaatgagctatgtcattatttaatactatatagtccactttgatacatagctcttatttagttgcctaagattacaaaccccttgcaaaccattatacttagattgcacatatgctccaaatcaattaatgacattttttaacaacagtggagcgcctaataaagttttttacagaaggattaaattttggaatatggaaatttacatcacataagtgactaaaaaaagaattaagttaggactgtcctccttagcaaagaaagataataagttttatagtcttgcaaatctttttaactttatcaattaggaaggcattgttctccctggtaacctttcagcaaagaaagaaaatgccaaggtacatacctaaattatagcaaagtgaattgtcattctagatcaaataacttcaagtcatatttggagggtatactctgaaattatgattgtaacattgatcggaacaatcacaaaactattctgacacttgattaacacagtcaacttgaaattcaaccgctggaagaaatggaatctttaatagcatgggacaaatgttatacacagtgcaaaattaattggtaaagtgataatcatattatggacatagagataaattgtgaaaaaaaagtagtgttatatagtttgttattatcatcatttgtatatataaaattcttttaattaatttacacagattaatcaattaaaaagttggtttataagttggtagtgttcaaattgtcaaaattttttattatttttctaaaagcatccttaaaattattgagattcttcgtttcacttttttatttaattatttttatgtagttaattaatgtgtcttaagcctttttcccattcatcaccaaaaagataatgaatttatctcattaatctaatacattcattgtttactagaggaagaaagcacttcgtatttctctaaattttttaataataaaaaatacaaaattcaaaagttaaataaagttaataaaaaaaagagtgtcagagaggaaaaaaactgacaatataaaaatagtgggcaactattcttgtttagaagaacatggaagtttaaggataaatttttctactaaaatatgtacaccaaataaaaatattttctttattattagtattgattaaccacagatgaaaaagtacaaaacaactaaaggtgttttaattaaaaaattaatacaagaacaattttgaaagaattcttataaaaatgggaaaagtaaacctttttttttaaaaaaaaaatatttgttttgacgtttgaagactcaaatgtttgttgaatccaattcaactagaaacatacttcttagttaggatgctttgaaagttatgtaatctataccccaaacacacccttagaaaatatgaatatgagtattaaagtcaataaatttatcatacaaatttatcacatagaataaattataattagatgaattcataaaaattcacattatcattacatattagtttttaggggttttatgtccaatctaatataaaataataaggattgattaagtttttaatccataaacttttaaaaatttaaatttagtccctacataaagtttgactagtcaaatcctttaaaataaattctcatcaaaacttttagtttctctcctcaatgttattgttaaatgatgatatgaagatgtacacaactgccatgtattatttttttgattatttaatgtaatttgttttcatgtctcaaatgttgcattcttaaattggataatttttttccaacaaaacaatctgacttaaaccatgtcaaaccaaattgataatttttttattaaaccaaattgatgactactttttaaaaaatgttaattgtcacttttttggtaaccctttatgtgaaaattgaaacttattaaaaattattacctcttattttatatataagaaataattatttaattcaataagatcaataaaataattagatagattaatttatcataaattttaattttattctaagattatctatgatattaaattgtttaagagatgattattttttaagatgaattatcttattttattttgttcaatttgatcttttaatttgtttgagatgaattatgctaatcatgtaaaatattttttttagttcatttttttcttattttccacttaattttttttaaaaaagtttattcttaaataaataatgatgtcctgaaatggatctaagaactaaattaaaaaaagaagaaccaaaataaatttttgaaaagatgaaataaaaactataaataaatcagattgaatttttttaaaaagaaactaggacaaagaacgaaataagtggtcagtatttttttttttttgcctataagttgaaacaagaatacaaaattacaaatacaaattaggaatccaagtaaaaccctgaataaggacaattgtttcagatctattctatgaactgatagtgatacaacaccatttttactcatgaaaacgaggaaaacgttgctcatttctctaccggaatattaacatctaacacaaacaaacgtgtctgtgacctaccttaaatgaaccctccgccacgcacacagaacattgttacgatccgatcctgaaggtttggtcatcgtggattctgatccacagaatttgcgtgacagtgcaacaattgcacccgtcatgcttcgcagatccctcatcttcatcctacacttgttgttcttgttgtcgttcggatatggggatcccgctcccaattgtactcgcctcagctccgtcgtcaattcggagtcggagttcgaaatggttcaacaccaactccgaggatccctgaaaatcagggacgattgctcctttagggtttcccaattcgacatgcttcccggttccgacgtccactggtggggtgcgcaggcttccgatttcgataacctcaccgccggattcattgtttccaacgacggattgaacggaaccttcaacaactcgaccttcgatgtgcatttgttgagcaatgtttcctggagcatgatcaacgtcctcgccgtctgggatcgtgccaccgcctccgatttcggccacgtcgtgctccgcaaggacgtcccggcgacgccgccgcctccgacggtgttcgagaattgcaaggttttgtcgaagaatttcaggttgaggtggagtttgaacgtgtccgaggattctcttgaaattgggttggaggccgcgactgggatcaccaattacatggcttttgggtgggctaattccagtgctgaagattctgatctcatgattggcgctgatgttgtcgttgcagggtttaaggaagatggtatgccctttgtggatgattttttcattactaagtatagtgagtgtgtgagaaatagtgatggagttgctcaaggggtatgtcctgattccttttatgaaggccctgatggggtgggtttagtcaacaattcaatgttggtttatggccataggaaggatggggtgacctttgtcagataccgcaggcatttgactaaggtcgatggaaagtatgatcatcctgtgaaccattcagcgaatatgacggttatttgggctttggggcgtatcaagcctcctgattctattaatccttactatcttcctcagaatcatggggctgtgaattatggccatttggttttgaatgtctcggagcatgtgaatgagtgtacaggtcccttggatgctgaagacaaagaagatcaaggtctcatcactgcagatgcaaatgttccgttggtggtttcttctgctccggcaatgcattaccccaaccctccaaatcctgaaaaggttctttatatcaacaaaaaggaagctcctgtcttgagagtggaaagaggggtgccggtcaagttttcgatccaagccgggcacgatgttgcactttatattacttcggatccgcttggtggaaatgctaccacgagaaatctgactgagactatttatgctggaggtccagaggcccacggagttcaagccagtcctacagaattagtttgggctcctgacaggaacactcctgatcacgtctactatcattccttgttcgaccagaagatgggttggaaggtcgaggtggttgatgggggtctatcggacatgtataataacagtgtcattttggatgatcaacaggttactttcttttggacattgtcaaaggattccatatctattgcagctcgtggcgagagaaaaagtggttatattgccatagggtttggaagtggaatggtgaacagctatgtgtatgtgggttggattgatgatactggtatgggacatgttaacacttattggattgatggaaaggatgcttcaagcatacatgcaacgcaggaaaatttgacacatgttagatgtaaaacagaaaatggcatcattacctttgagtttactcgtcccttggacccatcttgtaggcgggaaaagagggtagaatgtaaaaatatcgttgatcccacaactccactcaaagctgtttgggcaatgggtgctaaatggaccaatgatcatcttactgacaggaatatgcattctagtacaagtaatagggctatccttgtacacctgatgcgtggttcagcagaggcggagcaggatttacttcctgttttggctgtgcatggatttatgatgtttgttgcatggggtatcctgcttcctggagggttattggcagccaggtatctaaaacatctcaagggcgatggatggtaccggatacatgtttacttgcaatactcagggttagtaattgttctacttgcccttctttttgctgtggctgagcttaggggattttatttcagctcaacacatgttaaatttggatttgctactatattgttggcttgtatacagccagtaaatgctttcctaaggcctccaaaaccagcaaatggggagcaggcatcctccaagagggttatttgggaatatttccacacaattgttggtagatgtgccattgtttttggcattgcagcactttttactgggatgaagcatctaggagacagatatgatgtggaaaatgtccatggactcagatgggctatggcaatttggtttttaattggtgcattgattgttatttatttggaataccatgaaaggcagcgaatagggcggcagatatctggaagaggcaattgggtgcttggtaatcttgaggaagatgattcagttgatcttttgaggccaaccagaacaactgcagataaagagttagagccctctgcaagaatggaagtccagttagaacctttaaacagataaattttgcatgcattaagttctaatagacagttaacccatttttggcaaacttcacggttattttgcaagctggcaggcttctttattggttatgaggtgatgttggaggtgaaaagggaggcacttatcaatctctttttttgacttatgttgctttctagtttctctgtagattagttttgctgcagcatataatgcgtatagttatacatcttcaacagaataggttatatagttactgctactctagctgttactctttgtttttttttacttcttcccaaaatagaagaaaatcaaactttacaaggtgaaagcttttctgttgatcaatttaggttctgaatggtttagtttgatagtatcttagatgatttgagacatggtatttaatctgaccaatggcattgttgtaaattatgagatgcagaaaattaatacaacatcatttttattgtcaataatgctctattgttttagattctatgttattgcatgtttcatctttagttctattagtatgtgtttggttagggagttttgagagtgaaattcaatttttaaagggatttaaaatgccaagtattaaaatatattgtttgtatcaaattcaaagattttttttttttaataatggggactttataagggtttatttttaaagtaaaatgagagaatttcaaataacaccaaaactctgagaatttgtaaatttctctgatcatcaacaccctcactcttgtttgcaactattcaacctcgcatgttcttttcttggctataaattcttaccatcacatgctcctgagtcctgatcactctctcttgcccgagcttctctggctttctcttttttcttctcccttggatctcctgtgattgagctcttctcttctctttggaccacgtaaaatttctttctcactattctccaatctttttcttttcttattttctgaaaatatttgaatctattttgttggtgttcatgtattattctaatttctggactctagatctgattatgattttgatgttattatttgtgtgtgtgatattatttgctgtattgcaacatgattagagtaatattaaaatgcatattatcaccttctgtattctggatcttattcgctctgtgtttattgaaatgaaaaagcatattatcatagccaaattttaaatgggttgattccaatctaggtggtacatgccttgccctgtgtaaaactgcattacaatcaataagttcgtcatgtctgtactgtatcattatggtaaacccaatttaactttctacaagtttgtggcagctaccaaacaagatggaagtgtggatgaatgggcagcacggcttatgtgtgtttgtctgtgtccgtgtgtgtgtttgagcagtgagtttaaaattagaaattttctacaaaccagattaatcttattttttattggaatgttcagaaatcataattaatggtagatgcttttcttttcaacattttgtgtgcaaataaagcttttagagcgagaaggaccagttagaacttgcaagccatagcagtaaagcttagtcaatagtcaagactaggcaaaggtgaatattttatttcatcttgttttgttgtctatttgcaccttaggatttgtcaactgctacttttatgaatgacatacttttttcttctattttcctggtccactttattttaaaggaacatgatactgagttcactgctctataatattaaccactgtgctctaaagaaccttgttaactcttccccctaaaaaaaattggtaactcttctccaactcagttcttgatggctatattggcaagagtttactctacatcatatttgtaccattatttccagctcaacagcatgcttagtagtagatttgtgcaaattatgaataaataagaggttcctttcagtacaattctcaaataaagaattgtcaaaatttgtgtatacccatcctagagatcataacagtaaggttcaacatcactttaaaccatttaacaatgaaacatgaaaactctaacaaaatttaaattttaatagtatctatccagatttcaaatttggaaattactaaatcagagtaatattttcaaagacattttcaagtgcaaaattgaaatatgtaatatatgacattagtcctttaatcagatttttctacgtcagatttttctacgcgagacaatggacaagtttataatatgctaatacttaaaaataggtactggattaaattttgaaatttgtaaaataaaatctaaggctttagcctacttccatcaagaattttcaagcatacttatgagtaccaataactataaattcaaacttttggaagcaatgctgaatcactgtcatgaatcatgattccatataaaaacgatcgttacaagcccaagtatattttatttgcaaggatttcataaaattatgttgaggagtaattttttttcctaacataactatgtttttctcattttgtaaggtgtgtatttttcactttcatatcaaatggaattaatttaggataaatatttattttagttttaaaaagatgaaaaaattaaaatttaaatatcgaatgtgtaaaaagtaggataaattcatccttcatctaagtcttttttattaactcaaagttcatgtctacatcctacctccggatccaattatcattgaaaaatggttatatgtgttgtttattaggtaaaactaatttgtgagcaaatagtcaatgaattaatttatcagtttcaaaaattgttatttttttaatttaatttctgaagttaataatttattaccattttaatccttaaaattaattatttaatgatatgttggtatctgaacttaaatgtgtattgtcaatttggtctttaaatatacatttgaatttttaattagttatatatttaaagtggtatttactttccttaatttataatgaattttttttactactgtcaatgaaaaataattttcacaaattaatttattgataatttatacaggatgcaagtgaaattagtggattagtggagagaaaggaagggtctttctgaaattatcaagaagtaataccgaaactcgaaagcgcgacacgacatccaaaacttgcaaatttctgtcaaaataagaaacgaatgttggttagtatgaacgtgaattttgaagggtaaaatcccaaatacaaggaaaaagcttctatagtttcactctcgctgtatggctactctctcgctctctctcaattgttggagtatcgtggaacttgttccacatattattttggttactaacaaagtaaaaaatgtatctaaagataactaaatcttcaagccttatcaatttcactaacttattccttttgctctaaaaataagatttttagtgagataataatctagtgaataaaataaacctagaatctttgtaaatagtattgttattggtcgacgtaagaatccaaaaaatcaatcataatatctgtaatgaatttaaaataagattttatatgtatatatactctaataaaaatcagatttaaacactcgcaatttataacatcctgaataaataaaatatttaaataaacaataacacttcaatatattcaaataaatataataaacacaaattagtaatttccataatcataagattcaattttttggattctagaactagtgcggatttgatattcttcaaaggatctataaactcatatttcatgcaatgatgttttagtgtcttttccatcataaataaaggtattcaaaatctttttcttatcctagatgaagatatctataaataagtatcattcacaaatgaaagcatctaatattatattctcataatagaaaatacgtcattattcattctcataaggtgattataaattcacaaaattataaaaatatcattctagaaaactaacaaataaactctaattttgtgcatccaataatagtagaccccatactaatgtcatgcatgtaggatttttttattgtttttgctcagcgtcatgcatgtaggattgaatatattttaagatcttttctatttttttctttaatagtatatcttattttgaaatcttaaataactttttagtgagtctaacatgaatctcattttttaatatttaaatatttattaaattaaatataatgaattaagtaattaaatttaattaataaaatatggaaggaaaaaatatatgaacactaagaaatgaaataatttaaataatttttatttatgagtaaatgttaaaagaaataaaaaatacataaatttgataatagaaaaagtgtaagagattgttcaaaagaaaaatcaaattttattatttgtggttagtttttttatctccttttagttttttttttctctttatgctgatgccccatttaaaggagagagatttttttttaacactaagtatcttgagggttcttttataagaacttatttttcatgttggagatctatccacctcctttattaggagatctagtgaagaccatatcttgagttcaagatccttctgaagatcttatactaaagatgttctcatatccctatttgctattgaaaacgtggctagattttgctgggtctagcgaggcagccactcagcaggtaactgaatcaaggccatggctctggaaatgtcctttaagattttgtaagcttggtttgccatttaaaacttgaatactatatagtagatcataataagttccgtaaaaaggtagtgcatctgagtagaaatcgttcctacttgagataacttttcttgcaagtctgtgcttttttgtgtttgcgtctgtactctgtatcagtacatggatgctttgctgaactctggaaatattttgctttctgaatcaggtccttagctcacttcagcctttggattatattgttgttgcatttttgcctggtattagtgaggttaaaagaggctactctgcttggcttattttgtctttcttatttatttttcatcatttgactgatatcacatattgtcatcttaaattccaggaactacttttccgaggagcgattcttccacttttgggaatgaactggaatagtattaggattgctgccttgatttttggtgttttacacctagcaatggtcgaaagtattcctttgccatctggtgcatatctttcctatttcccctctctccctctcatttctctctttttccccatttatcgaaaattgttttgctgaatttaattcctacactaaatcacaacttttttccattattgtgttgttagttctgattaaattacaataagattttcgtttgtgttttagggcaacctttgttggtcttgcttatggatatgctacaattttatcctctagtgttgcggttcccatggcttctcatgcagtgaacaacctgattggagggcttttatagcggtacacgtcaaatacaccaaaccagaaattaaatgagtgattgccatcttcatggataagtcaccgcatctctatacatctaaccctccctgccccggatttgatgttgtataaaattgtgatacagaaatcagagttagagaccaatccaagaagtatgtttgcaaatgcagctactaatggcagcactgctctctcctccattgtttaaggaaaaattcaagtttgtatattacaacattatatatagatttctgttgtagttctcttagaaaacattccatgtaatttatttaccataaatcgataactgtactttataaagtggacggggtcacttggcttgcttaccaatttggttttgttagtctcccatttttggaatatggcttcattggcttgggacttaaccttttgaaggaatattcccctaaaaattaaacggaaaataaacagaaaaccaaatcacccgcgttttggacgagtgtggcaagcaggaaggtaagatctcaacaagcttgggttgcgctcctctttctattccttacccctttataaaatgctgcactttcaatactttctctttttccttttttttctttctcatctctttgttgtctgttccttttcccccgaattttgggtaactaccacatatctcacaaagcttcaatcttcatggcttcggtaagaattaagatcctcccaccatgtcatgtaatcatgtgtgttcatttctagccaatgattttaaacaacaacaaaaaaagtcattgattttatcaaaaacaaaatggaaatgaggtttagctatgtaccgaggtttccagcaattctttgttgttaatgatgagcaaaagggtctttttatttttcatcttctatgaataattaatctctgttttgacgtaagcatttatgtttgcatgtggagtatgaacaagatggaaagccactacccaagttcgggaaatgggatgtgaatgatcctgcctcagctgaaggattcactgttatattcaataagctaggccagtgacgagaaaaaaaactggaggaggaggatcagggggcattagatcacagcgaagaaataattcgcgcaaagatgatgataaaccctgctagttacttatcaataatacagagttatgctatttagtacgagaaacaaaagtatagatttctctccattagatgtacatgtgtttcattggtcatttgaaggttaaaaacagaaaatataaacttgtactatttcacagaaatcatgtgaatgtgtttctacgattgtttctttttgcaatgaagttcaatatttaataatattatacatatgattttgggtgcagaaaaagtggttttgctttagaccctagacaaggacaagggtataaggatgtgtttcttgctgcttgggacgtatatcatgattctcttcagtttttcttctgaggtctcatctgtctccagaccacggataagagataaaaagaaaagaaagaaaatagttgcagagccttctcaaaccatcgttgtagcttccagttattaacatgttttcccttctacttgttgtacgcaccggcacaaagtaatatgtaaataggagaatcaataactaactaccttttgcaaaggcattagttaaacagatatgtttttcttgctgttacttcgtgatgttgatgagctcagctaggcaattacttatttttagtttaaaaaaaaacaaaaaattaagtatcatatattataaaaccatcattgcaatttatgaataataaatttaaacattgaaaatcatttccattaaaaaatctccacacgtctatcaataatttcaaaacttaaaatatttaataactaaaacatgattaaaatatacattaattaaggtgttaaaattaaaattaaaattatatatatatatatatatataaatatgtatgtataacaatgttatgtgagagaataaaattgattaatctcaaatatcagtcgttaaattaaaataaaaaattaagattaaaatattttaaattcaaattaaaaatccatttatcttaaaattcttataagatttatcaaataaaaaattaaatattttaaagatttaatttaattaagatcctcaccacaactattatgattaaatgaagttttgatttgaatttaaaatattttaatcttgacattttattttaatctatgattgagattaatcattctcatccgttagattaaaataaaaattcaagattaaaacaatttaaattaaaatctcgtttaatcatacaatctttataagatttattatcatcgtcgttaccaccaacatgatgtcactgccattatcactgtcgctgcttgtgacattaaggctaacaactagtggtggtagtgatgatggcggttgacaattatgatgatagatttaagatattttagaatatcataaatcttacaaaaattttataattagatgagactttaacttaaatttagaatattttaattttaacattttattataatttaaagaataaaaatgatcattctcatttttacataaaagaattattatcatatgatatatgtcctttatatatatataaacttaaaaaattcaccaatcacatgtataaataaatataattaaataaatataatttaccaatcacatgtataaataaatatatggataaaaaatgtaaaaaattcaactactacttatatatgattatagaaggaagtgtataaaaaaaattaaaataatatttaaaaacttttctagacgcaacctcactgaaacacatgcatcccaaatacttaattaaattatttatttatatattccatattatttaattacgacggggacagcttttattattaaaaagagacgatgtttaattgccaagcatggcaaatctaacttgaaccacttttttatacatcattatcagttatgatttcgctacacatgtagcaaataaatggtggtggtggctgaatgtattttggttttttctatttttacttaatttctaacgttctcaatgaaatccttaattaatatatccttatatatactcactaaattaaagatcatttaaaaattaaataaatttatgaatattaaaagcaactaaaaaattggaataactaaaacttgtcgatcatatatatgtagaaagattacaaatatatttaaacaaaaaattaaccaccaaatgattattctacttaggcaatgttaatcccatgccagcataacagttaactaatcctagaatgatgaaagagtaattaatgaccctagtccaatccagaggtgtaagacaaaacaaaatacaaattaaggtaaagcataaaattcaagcaataaagtttgattcatatgaagaatagcgttagctgtcaagcaaacatgcgaaacagaaaaacaaatcagaaacaaaaagaatatgaggttggacttaaatggcgaccattcctggttgttggaattcacgtgactcctcattgctcagttcaagcaaaacggattaggccattcaataattcaatttagaagaagttaattgaatcattaattcacaactgctagttgcttctactttgccaacttcatttgatcgatatagtaacgaacaagattagtagattatataacccctataatccctcccgctacatttgacgagttttgagtaaatctatctggaactgtaatggttaattaaattgatgcttaaaattaagaaaatagtaaaatattctttaaaaatgctgcaaatgtgtaggaagtctactaagagaagccttcaactatacgccaacacgggcaacaccttcaagggaattgcacatgcatgtctaaaaatttatgaaaacaatcttagccgaagaatgaagcaaattcttgttaattaagaatgcagcaagttgtacgtactccaacttaatagaacatgagaactgttttccttctaaatcaagtagtctttttcctccttacataatgtgataggatgaagaaggtcttaaagagactcaaacatttcctcttctcatacaaaaactgtagaattatctaaaataatttgaaatatatgaagaaacatatttaggcttgtctcctagctaaccatttatcagtccaatgtgatttcttatttgtcttgttaaatcatcaaaaaaccacaaggaaattaaaagtgtaatacactaaatttgaactccatcaatgactactatctcaatatcttacatgatatcatgttatgtaatatacaaactcgcattatatatatttattctaagctaaaggttttcattttattgttattgtactcttactaatcacaaaaaaaatatacaatttagacttttgtaaataatatactcaacataaatattgattcctttaacaacaataatcttaataaattaaatatgtattatattatttaattgtctataaaacacacaaaagcaagagtatcgtgttagttaatctaaaaaaatattgattttctgtatctactaattcttcattatttgttcataaaaaattatctaaaatataaaaaacaatcaatctcaacaaacttttttatactaattaataacattattttattaaaatgtataccaacttaagtgttaattaaaatgtgtttccaacatccgaatgcatcactcaattagcttataactaataattttgatctcagtaattcgatttcgatctaaactagaggtatgaacaaattggttcggtaaaaaaaaaattgaaccattttaacaattcagttctcaaattcaaatgtctaaatttttttagagaattggttcaaaacaaattgattttgtcttgaactaattatagaattgaatcagttatcaaacttattttcaaactactttataaaaacacaatttagaagaaaaacaattcactttactaaatttgtttagaaaaaataattcggttcaaatcgaacttattttaaaaattaattcaatttgttttaatgtaacttgcttgacaccaaatcagtttgattcaagctaggtgtaaaatcagtttatctcaaactttttgtttttcttcacaccctagatctaagtgtgtgtttgaattgatcttgataaaattgattttatatataaaattaatattaattaaaattaattttaaaatgatttagtttatgtttaaatgttttataataaaatcaaattaaaaataaaatattcagtataaaattttatatccaacacatattcctcaaagttagttcaactaggaatcaattataaattattttttaaagtaaaaccaaatatatatatatatatatatatttaaaatcaattataaactccaaattaaaacattcactaaaagatagagctacctcgatcatgaatttattgcaccagcacatcgacctttttcacttccgaagtggattccattccataactcttgacaggtaaaggtgatggtagcatagcagcaatttggtatgctcgggaaatgtttatgtggtttgttaggtgtaggaatgcttatttgtttcacattcattaattgcatccccaacctccgtgcatatgactgttatgtattcacctgtcacaatatttaacgcaacccatttctgccaaactaggaaaacccgcaaaaaactataggcaagaaaaagagacgacaatgccacgtatagttattacatgcagcagtgttgttgatgagtactacctcacagtactcataatctcatgcctcggtttgatcgtcaccctcaactgcctcatctccttcttcgcttggatcttcccaacctgtttccgatccgagaagaatctcgtccgaagctacggttcctgggctctggtcaccggagccaccgacggcatcggaaaagccttcgcagaccagctagcgcagagaggactcaaccttatcctcgtgagtagaagcttccagaagcttgggacagttgccggtgaaataaaagaaaaatacccagacacgcgcgtgaagattgttgagatggacttcgccggcggcgacatgtcggagggtctccggcgcgtggaggaggcgagcgagggtttggatgttggcgttttgatcaacaacgtggggatcacgtacccgagggcgatgttctttcatgaggtggaggagaaggtttggaggaacattgttagagtgaacatcgaaggaaccacgagagtaacgaaaattgttttacgtgggatgttacagaggagaaagggtgcgattgttaacattggatcgggtgcttctgtggtcgtgccttctcatcctctctttacaatctatgctgctacaaaggcgtaagctttcttaattttctttctatctaaaacccttccattttctttctttcttttatctttctaactgaaaaaaatgcttttacaaagtaagtaattaactgaaaacatgattattagcattgttcataagaatgacgtttttttcaggacaaaggtttatcagtttcctaaaaatattggctaaagaacctagttagtaagaatctttttttattatgaaaataagaacgatgaagaagcattaacttgcttcgtgttggctaattaaagtgagctgaatcaatatcccaccactaaaggacaaagctctcaaagtaaacaaggtgtaataatggtaacatcaacaaaaatgatatgtttttacatcgatcctttgtacatatatccatcttgaaaaggatttagatggagaaaaaaagaaaaaatgaataaaattatataaatactatcataagttatgtgatagtgaaatgagagataaaaaatataaaaaaataaatacaaaaagttataacctaatttttctttatcttgttatgatatttttacacttcaaattttatattaatttaaaattttcttctcttcttatttttcttctaaattcttaagtatattcatgcttcaacgagtacttacaaaaatttcagacatattctttagtactttcgtggttattatcactgatatgcgggtgactgtcgaaagttaatgagactgaactctcctttaagagagacagcaattctcacatcgtcactcaactatattttaatgagggcaatgttattcttaaatatattttttttcaaaaaaattcttttaatttaaaaagttacaaaataaaatgattgatgtaataaaaattaaaaaataattataaaaatattgtaagcataatattatattgttttggcatgatagtaatctgacattctgtattattttatatataaaaaattctaagagcttttcttttgtgaataaaaagttctaagagcttttatatatagagagagatgtgaataaacacagctaatattttttttaagaaaatgaaaatgacactattaaaaataatataatttgtaatgttatgtagatctaattaaaactcaacaaacttatttatcatacacatgataatttttttatcaaatgatagtgaagagaaatctttacagtattatttattctaaattaaaaatgttaatttttataataattgttttataagtcaaaatttaaatttaagataatttttaatcgagtaacaatataaatatacagaatatcagaatcaaaccaatattataaacataaaatcataagtcaaataaaataatatgcatatatagtgtctttattaattaacaccccaggcgagtactgaaaactaaagtgaattggacgatggaaagatgcagttacgtggatcagttatcaagatctctgtacgtggagtatggacaatacgggatacatgtgcaatgtcaggtacttacaaatgtctactttaatttgttagactgtttttgttttttctttgttcttataacgaactgacattttataattaaggctacagactaaaggtaatgtgcaacacatattatcaagccttggatcagctagagaaaactattgtaaacttatctagatgtctaaagcagctacattataaactcgcaggaacagtgttttaacattcatagtatttttatttcatgtttaaagtcttagaaaagaatatcaactattggaaatgagtgatcaagtacagtttgcatgtgcttattagttaattaataatatgcatgacttctgtattctgatcaatgtatgattaactctcagttttttgggtaaactttagtattcatgattaatatttaatactgatcatgaatgaaggtaccattatacgttgcaaccaatatatataatatcaagggatgagtccagtattgtgatgtaattcgtatgatgaattcatcattttctttttttgggtaaactactccatattatgattaaatatttaattctgatcacgaatgaaggtacccctgtacgttgcaacgaatatggtatcaagggtggcatgtattgagagagattctttgttcgtgccaacagctgaggcttatgcaagagctgcaattggtgaaattgggtgcaaaccaaggtgcacaccttattgggctcactcaattcagtggtgttttgcaaacttaatcccagagacactacttgatacttggcgcttgtccatcggtatccgccgcaggaatcaaaagggagactgaatattaactaaggactatcatttctcactttaattttatttgtatgaattgttattataatatgttttaattttattttcaataattatatatagatatgtgatgtcatatactaatcaactgtttaatttttttttcttttactgtaaaacatggcttcgcttgtccctatggatcatgcacttaaatataaattcatgataaataaatatttttaacatacaaattatattttataatattataatacaagattatttttaattattatcagttaaaaaattattgaaattcagtttagaaataaagataaaaatgataatggaaagagataagtagttaaaaaattaagtggttcaaataaaaataaaaggtaagtggtttgagatagttgagtagacatggcaacgggccggggcgggtgcgggtattgtattccccgtccccgcccccgcctttaaaacccgcctccgcccctgcctctatctcccgttgggttttaaaattcagactcatctccgtccccgttgggtcgggttttccccgccccgcctccgtcccacccctactattaattaaaaaaataatgtggcttttcttttgaaaaaaatggaaaaaagttgactaggtaacaaaaaaattaataacaaatccacattcaaaatatgagatcataatttaaaaattattaaagaaaatcagtcaatttaattaaaaccattatggacctacatatttaatttctcccaaaatataatatcatttaaatatatattgttccaaaattaaaataaaacacaacaaagagtagaggtccattgcagcaacaaagcttccaaaatggaattaattcagaaagttgttggtcaaggttcaacgccgtcgagaatgagaaatgaggggcagggttaggatttcgggattttattcttatatataaggctaaatttgtaatttaattatggcgggggcgggggcgaggcagatatcatcaataccaaacccgcctccgtccccgaatttttgtcgcgggacaggagctgggcgggtatcaacaataacaaattcgagtttttcccgttaaaattgggtgggttttgacgggtacccacggactcgggtctcgttgccatgcctatagttgagaaataaattcttggagtaattattaaatcaaattaaattaagaaatatattttaaaggaataaagaattaaaaaaacattcaatatataagattaagataagacatgagactcaatcaaaataaatgttcacagataactcgtagaagcacttctatttaagaataacttctaacaatgttttacgacggccttctccttatatgatatataagtgatctataaaaatccattattttaaaaaaatactattatataacatagcttaaaatacacatgctggagaattcagcaaaaaaaaaattacatgctggagttcttgtacaatgctatcaatataacgtattaattctatgctatcatatatccatcgtcccctaagcaaaatacacggtgcaataagcgattttgatcatcacccaccgtaacgatcaccacctctcaaatctcaatcattgagcaacactttaccgagaaaaaaagttcaaaataccccaaaagaaagaaagaaagagagaagaagaaaaacatcttaggagtcgtacgtaggaggagctagtaaccgggtcggattctgaggtcgttggtggtgttgacaccacgaatacgggtgggaagaaagaccagcaggggaattgaggatcaaaataaccggatattcattcaactgtttatcaagtaactgcatccatgatcaactaattcatcattgctttaatacatccccttgaaaacgggatttgtacggcaaatgcttgctccatactcctcatattctgcctttgtatgacaagcctgtacattggaacaaaaattgtaaaacttctctcgttttccattgagacttatcggaaggatttaagaaacattaagaaattatgcatactttcactaggagaacattatagcaagacaacacatcgcaacccacaacgatggcaaaccaaaagaaaaagaaaaaaactctgatgtcatatttttacattgttcaagtttcatatttcaacttaacaaacaataccagatattttgttaacatgtatgcaatcgtagattcgtttaacctggcaaagcatacaaaattcaggttatcaatgtcaaacaaagaggcatagacaaccaactacaaacgtgacattgacatgtaatccatccaccattgctttctcatggacaagaaataatctaaagatttattgtcaacaaataaaggtgcatctaaaagaggcatcgacaaccaattacaaatgtgacattgacatgcaatccatccatcactgctttctcaattctcatgcacaagaaataatctaagatttattgtcaacaaataaaagtacatctcaaacctataaatccaaacataaaaaaaactacgtacctcattgcctaaagatatgcgaagataagagggaaggataccattcaacaaattgtctcagaccaatgtgctcaagatcaaaagagagttttttttttttttttcagggtatggtacttataacttataagtcatagcaaggaagaatgttaatcattgaacaggtacccccaacccccacccctttccaattacatggaagaacacactattagtacacaaaattagtgattataggatgcacgcattgaacctcataaccccccaaaaaatgctggaaatgcataccgtaaaaaattcaggtgttgatgcaagtactgatcctccaaaccaaactacaaatctctggattggatggctgagtacatttacctccactggctgtgactgtaggctccaaattaatgaagtaaaaaaagttaatgcaagaccaaagcaataaatatatatagcagtacagcctgccataactatatcaaggggacaattttgttcatgcatgtgttggaccaaaagttaagccgatgttaataggaaacttgaattgtgaagaaacactttgaagtctaaagaattcacgttaagtcaaagcaagaccgagtatatgaaatgtgagttttcattggtaaaagataatgatcaagacttcatgcatctatttggtcaagaggtacccaagaaaaatgtttttagatacttgggatcaaatttgtaaaaaggtggagagaatgatgagaatgtaaatcatagaattagagcagggtggatgaaatgacgaagtgcatctgggttgttgtatgaccacaaaattctccttaagctaaaagaaaaattctatagaacaactataagacctgtaatgttatatagagctgaatgttggtcaatacatagacaacatgagcataaaataggagtagcagaaatgaggatgttaaggtggatatgtgattatacaaagatggataagataagaaatgaagatatttgacaaaaggtagcagtagtaccaatgagtgaaaagatgagagaacatagattgaggtgatttaggcacgtaatgagacggcccttgaatgctctaatgagaattaaagtttgttaccaagagtttgacacaaagagaggtagaggtagaccgaaacttacctagggaaaggtagttaaactagacttaatagagtgggatatagattggcggacgatgtgtcttagaacataatagagaaaagttataaacttggtggagggttagacccgttattatctctatgttccagatggttctattttagttatttttctcttcatctcccccttcttctttccctcttctttgcttttaccctttttttttcaacctcctcgtatctatcattgggttcatctatcactgatcccaattaacttgggttaaagatgttgttgatgttgatgtattgagccataaattacataaccaaaccaatcaacaaccagcataacactgttttcaacgtaaaataattatgtgacaaaataatttatgtaattatttaatacaacataatgatgtattgatttttgattggtttaatccatacaacttgtgcaaacagatttacataagaatttctcatccatgtgtgtaagcgagggagagaatgataagtttaaagatggtttaaaggtgcctattaacttacttttatctccccatttaagcgtgcttcagacgaaaggacacgagcatccactatttttttaagatcacgttgcaacctcctgtgaaaatccttgaacatggttgtacctccagacaacacgatattctgaaataaaaaatacaaaataggcaagagataaagagatcaatcattaagaacaagtaaactaaagggcttgaaattcatatgataaaaaataaaatatcgtggctggactgatggactaatataacacttgacactaatgtactccatctgggccaacaagaaaaaacgcctcaagcttaacattgaaccttggaagatccctaattttatgattggaagtgatggttcactcaaatttaaaagcactcctggggattattaatatatacatgtcagtaaagtacttcaccttgtataatgatctccttgtgtcaattggcgcagactgaatgcatttgtctattacaactggcaaaggggtagtaaagtcactgctatatatctcaggattaaagaaagtctgcagaaatcattgggaaaacatacagatatgttaaattggctggtcctattgatataatgaccccaactgaacctatagattagctcaggaattacaccaaggcactactacagtttcatgaattattcaatagttaaaaaactcaagtggattccataatagagaaaatctaaacagtggccatagaacaaacctcagggccaagaaatcgttcataaccaatatcacatgaatatggtgcccccgtctttggtttaatacctctccaatgcttgatgtacttgcctggttctttgtcatgcttattaaattcctgagagaaattgagctaatgttatgtaggaaaactaaaaagtttaaaagatcacttgagttacatcccttgattcacaaaaagagaaaattaaagtatttattgacattagacatgcaaatggcagaggcaacaaaactattggcagaggcgcaccacaaactcctcaaataattctgtcaaagaactgagtattgaaataaagacaaccttcacaatgtcagagcaagtgtagcaatacatttccttcactttccgtgccacttcaaaagagtcttctggtggtacattttctcctctttcctgcacgaagcaatgtcaacacaacagtttgtcaatctagcttagcaaaatgcagtttgacaattggatgtggattattacaatctcagacagttcaacaaaaaaatatatagctaaatacacgaataagtttcataatcaatcatgaaataagtaaacttcacttttttatttattaactattaaaaatgtaacaaaaataccatcataagtgcatcacaccctattcatccagattagcatttacacattggtttcactagctagtgtaaatggtaatttatgatatctttcaacattaaaaagaggtttacaaaaattcacagatattcaaatatgggaacaatacaggcacaataaccttttaattttataccagaaggattacccacccgcataagctgttgaacaaaaagagtaacatcctttccagcaatgggaatcgatttgatgctactcccaataacatagccatctgcaataggtacaacatgagtagccccatctccaacatccactacaactcctgtcatttcacactaagaagaattccagatcatcctaaaaggaaaatattcttaaaataagacagatataacaagaaacaaaatatctccatagctcttatggtattgttattgtaataccccaatagaagcacaccagaatgagaaggattcaaaggttgggtaggtatgagactatacaattgaggatgacttgaaggaattaattggtactatcttaccaacaagatgcatctacttttcggtagtccatcatataggaacttcacaattaagtatgcttgacttggagcaattatgaaatagatgaccttctggaaaatttctcggaaaacgtgtgagaacaaaacacattgaaaagcctcatgttagtttgaggtgttacagttatcaaagtcaagtataattatgcagagtcagcttaacattttatatttaacataatgagaggagctgaagaattgtcctatgcactagtaataatgcaaaaccacctcaacagttcattcatattctacagtacggcttacttttggtttcaagtgaaagtatccaaaagtatcgaattgcaggggctgatgaaacatccagtgcattttgtgtttagatagctaccaaacttgttgctgctgagaccatactaaatatgcacagcattcaagattaatcatccaaatccaattctatattcaacataattgccaatctttttcgggtctaacgattaccaaccttggatgttgtgtatccagctgcaagagcaagcacagaattcacaccaatgtaaagtccaggcacattaaaagtctcaaacatgatctccccagtatactcgcgactctcaggcggagtcaatggactctcgttcaagaggaaatagtgatcctccggatcgcacctcaaataattgaaaatgcactgctgccagaagcgctccatggcatcccaattctcaacctggccatgccgaattgggtagctgagattgtaagtgctactagatcgagacttggtaagtgcttcatccccaatgaagaaatcaagatccgccataactccagcattgtgctgggccacccaattgcctttagaagagcccctcgattgattcagaaacgactcattaactgcaacaactgtcggagcaataaaacaaggctcaacgttaccagcaaaccccatcttcgtatacctgcaaagaaaacatcattttccaaattcagagtaaacccaattcaggtcaatcaacattaaagataattctagttataaaactaacaccagtggggcattcaacaaacacatggtgtccacaccacataagaaaaaaaataccacataaagctaaaagagaaagtgggtgatagaaatggatgaaaagggtacccggagccattatcgatgactacagctggacgagaagtggatgggtccatgagaaaaagcgaattagtagtggtagtgatggtgaacgctgaaggtggatctgcgactgagatccgagagcgagcgtgaggcagaggttcatggcagtaaagagcgctgtgagaagcgcaagaaggaggaggaggaagaggaagaagaaagtggtgtaggtgagagtaaagatgatggtgacgcagactttgatccaaagtgaaagaagatagtaaaagacaaatgggaatggttggtgattgttgttgctaaagccatttgaacacagcgagtggaagtggaagtgcaggtcccatttagtcgatcatcattctgttcgtttctcagagatgctttccttggcaaccaaacaacgactcttctcttctcttctctctctttcttttatttatatttaattaattataactatagtactaatgacggcaactacaattgtcgttgttggcgtgttggtatggtacgaagaaatgggggatgctttatcagactaagccgtttgatttcaagcaccggttgcagagacgcacacaacacagatatttaacttgtttcatttctttcttacacgccaacctttttctttcttgctgcctgccctagaccctagtacgatgaattcatgaacctctgttgaaaaaaactgtcggtagtttttaatttaaataagtataaattatatatatatatatattaaaagaaaatatttaaattataagagaagtaatagttcattcaaataaataatatatgcaaatttagatatagaattgtgttaaataattaaaaggataattttatagtttataatgattatattttgatttgaataaaattgttttttattagatatatataataaataaatgaggaaactctataaataagaccttaaacattattatatgcattctagagagaagatttatagatttttgtgagatcttttattattattgggattcatttaattatttcatagttattaaatgtgtataatatttggcacgacattataatgaagacgttggtttcccaagttatttgttcgtttccagtttaaatttcaagcctcaagtcatcggttcgaaactagcaacatccaaaatattttaatacaaattatatttaagaatattttgcgtgtaaatatagccaaaattttgctctataactttaggtggtcttcaagtggtaaacacctcttttctcaaacttgccatagtaagttttacaattattttggatatattggttataaatgaatatgttttgagatagtcttttgaacatcaacaacacctttaatctaagttaattagagttggtggtagatgaatttaaagatagatcgaaaatgaaacaaaaagagaaaaagagaggagaaaaaaaaatagaaataagaaaagaactaacacaaggaaataattgaaatatataattaataatggatttaatcatctaccaaacttacaatttttctccatttcgtcctaaaatataccgtctgtcaatctatatcttactccattaggtcttgtttaactaccttttctcatataagtttagttttacctttatttatctgtatgtcgagctcttgataacaaatttttgttcttactgaagcattcattgagcatctcataacgtgtccaaattatctcaattttgatatagtttgttaattgtattttttattttaaatttttaattagagaattattttgaatttatgtgggaagagatgagggtttttcttaaattaggaattaatattattttaagattttgagtttattagtcactaaattttttttcggatttctgtttttaatccctaatttaaacttcgcatcaactaattgtaattgcatcctctaaagtgttgatttaatcccatgttaatcagtgatatggttttaaatagagcctataaaacttgcatagtcctaatttgaagggtcatttttttaagttgaattaggtctttaaacccaatctgcatttgttacactctagacaagtagtctttgagaaaaagtgttagaatgtcaccttaattgcactcatttctaatccaccttagttgtgacctcttcattaactaccttaattaaaacagtggtttagttccacacagctagaaatatagtttaaagagattgaacttataaaacttggtcgatcttcgtcataaaagttgattttatgaggctgaattaacttctaaattgaaattctaagaattttattcatacttcataatttattatgttcgttctgtatataaattatgatttttgaaaccgaacaaaacaaaactgagtaaaaatggaaaacaagtgaggattagagtttaaaaaaaaaaaaaaacatttctctttctctttcccgttgcaaagcccagcaggtgcaaggcaacaattaatcaacctttcaaaactgcatggagcttatttgtagattcaacaacagaaagaaagtacaaacttgaactcaatcaatcagatctaaaaatcgcaaaagggaaggtacccacaacagttgcaacaaaaaagaaaccactggcttgcttgggaatggaaaataataaaaagaaagcggatatagcattagatacaagttgcatgaaaactattagtatgatgataattgatatcccacagcatttaagccccttcccaattttaaacttcacaaagatcaaatcactgtgatctcatcctgttgagctggttgagagcaggctgcaagatgttgtaaagcacccaagcaatagccggcgtaaccacaaacagaagaagctgtcccctgttgtcgctcgcagcagcagcagcttcagaagccgccgccgatgcatgcggcgcagccaccaacccagccaagccgccaagccccaagccaatgatcacgcctttggtgctgcgcatgcggttcagctggttcagcgccggctgcagaatgttgaacagaacccaccctattgctgggattatgggcagcaacagtgccagtcctcggttgtcgccttctgctatgtcggctatttgttgaacagcgaaagcggcgtcgcaggttccgagggttgtgaataatgcccctgccattgctgtcgcagtggaaagtttagtgctttcgggtgaggctatgaggccctttggaaggttgatctgaagggagggttttgatggtgcgagcttcgtcggattggggaactttaggttgacgcatttggcgttgatcatggccatcgctgatattgttgatgccattggtgagaacagagaagaaggtagtgagtgatggcagtggcagagatggggaacgtggctctgattgtgggaatagcaatttagcgtttggaaaaagccacgttggagaaacgaggtccaatgggattgtggtttctagattcttctcttatgcgaattgggggatatatcagatttcgacctcatatttcttgcgtttcttatcatcacttgcgctgctcaaatgccaatattttcttgtttttgttcgtgacctgtttgtcccaaacacgcgttttacagtgatgcaacgacacgtcgtttataggaaaaatgaaaatgtttgttgtacttttaagatgaaagcatctacaatgagaatgtttttttttttttcgtgttccttagagtatacatatattaagaggaaaggttatactgtaaattcataaattatcaatgcacatcaaactcagggtatccttcacagatttaatatgtgttatcaattaaattgaattcattgagttgacaaatctttatttaattatcaatattaactaggttgcagcgataaaaaaaaaaaaaaaaacaagtacagataaaaacaaaaagataaagagtttaagagagaagtaaaaaaaaaaattataatactggccaaccaacacgtgacatataagttttaatatatattgagataacttttacttatactaaaaaggatctcttctctcgcctgtaaatttgttctcttccctcctcttttaattttcctgtgtttacaattaaaaagggttttaaatagactttttttgtagcctatattatgcgatgagacgaataagaggagagtgttaaattttattcagcaaacaatttgggatgactaaatgtaacaaaaggaaattgcaactgatgtacttggaatgaggtggtgcccaagtacacgattttaagtacctttcatatgaatcagagtattgttgagaaaatgaaaaattcaatggctaaatatttagtttagttccaaaaaatgggaggttcacattttagtttcttaaaaaaaattatcaaataaccctaccattgagtttagtgtgttaatgttaatgtttttatttatgtgacatattttgttcacatgtaaatgataagtgacagataatagttggtaggtgtcaattgtcatattttaaaaaattgactttttaatttagtctctaaatttaaatatttattatcatttttgtctttaaacttaattagttattgatattttttagtttctgaacttaattactaactctcatttaagtccttaaattttttttcaaattttgatttaactttcatatgaaattatttgcatatatatcaccatatcttctcactttcattctttatccttatggttttcaccttcctcttatgagattcagcaaattatattataactatgaaacttatttatgagcaattacataggaatagttaacagttaaattcaagataccattaacaagattctagaagatttaaaactcaatcttctacccaaaccaagcttctaaaacttatatgccattaaatgtgcagaatgttagaataatcatttttttcgaagcaaaaagaataagttaaataattaatctattttatgaaataacactaatcatgaaaaaaataattaaaaaacttaagaatcatagaagaaagaaaaatgaatgtgttataagtatttcctattttttttcattctttgtgatttttacatcattgttcaagggtctctgatattaggggtgtgtgaacccatgaccctctagtggcatgcaaagcagtgatgatttccattgttttatgacatttgaaaagttgtggaggaaacttttttagcatgagggaggtgtaagttgaaggaaggggtgacacaagatccatgtgattgttagcgaggataatttctaatctttggtagacctcttagtagtagtcgaacctagaaaaaattatgatcatctatcaaagaagaaaaaaggagtaactctgcatcaatggaatctcatcatctatatataatgaattggtgtggtatatgcaaatcacaacatatgaattgtaaaaactagtattttaatcaagactagaactcaaggatgataaccgttaatgttattatcatttaaaataagaattagtttcaatttttatgtgtaaaaatagtagaaaaataaaaaaaaatattacttattaaaagttaaatatttaaaaattacaaatgaaggaaaaataaaaggattaagcaaagcagaaaatgcaaacaacgaaagttgttagtttgattaactactactgcaagttatatatagacacaaaataatttgaatgtaatagttatttgagagtgttaaagaagatatttgaaaaaaaataattgaataaaatgtaattttttaaagaagctagtcaatgtttttttaaatgtttcaattgaataaatatcaagcttgtcatgcagttgatggaggtgaaagtcaatatgaagtgcgaaaaaaaagttgaaaaatatgagtgataataaatgaaagtagggatatggtgatgattaagttaataacttatatgtaacataatatttaattgaaaattcaaaagtacttttaaagaacaaaataaaaataagtgattaaattaagagaccaaaatgttagtaagtagttaagttcatgaaccaaaataaaagtaattaagttcataaattaaattaaatagtcaattgtctaacttgtgatagtcatgtaaaagttatgagatattgtacctaagtgtcatccatacgtgcataaaacttgtcacacaaacaaaaatgttaatagtagtgaactaaacttaatgatgtgaataatttgatgcattttttttaattttagaaactaaaatatcaaaaatctcattcttttaggaattaaaattaatttatattcaatgaatcatacttattatgctagattttaaaaccatggactgcacaagttcatataaataattattttatatttttattcatcattataaaaataaatgtacataaataaaatttaattcgtaatactatattaaatataatcatatcaaaattaagaaaaccgattgattatatttttaattgaacatatgttgcatactcaaaaataaatttatggtcttgtaaaatgattaattatatttgtaaaatagagaatatttattttaattaattatatttaatacatgaaaatattaaatatatacccaaaatgggcatgcacaaattagttctaatattttaaggactaatttgtgtagacatatacattgaaaataagtatattatttaaaataattattggaacatttttatttaaatcaccaaatataaagaaaatatgaacatcaaatttattacaatttttttccaaatgtgttcatataattatgctaataaagaaaactaaatttttttaacttatttaaaattaatttaaaaaatattgatgaatcgtcgttatttgaaagaatttcaaataataccgaataaagttatcattgtgcaggatttatttgtagatattaagcaaaaaaaagtttttttaatattaatatcagagtttggagacgatactaagttttttgagtgtgtgattggaaaaaggtaattttaaattaaaaaataattaataaacagacatcatatggcatgttgttaacgggaataaattaacgaattaataagaaagtaaaatttaaaaaatatttttaaaaatagaatattaatttttaaatgaatactgcattattttttattttattagtttttctatttctatttaataatatttaaatatgataattataaaatagtaatatcttaaaaaatgtataatttcgataaaattaatttttcaaattcatattttaacacacctacttatgtcttatataaatttacaatttaatatatatatatatatatatatatatatatatataacacgaaaggttgaattgtataatagtaaatgtaatgaccggtatgtatccggctcattaacatttatttatggtcttaagcgcaacaattaattattattaatcaatttggaagcgataaacaaagtgacgtcatcacaataacatttttatattatgtatcaaaataatggcggtaaaaaataaggtatcatataccctatcctctttacatacatcgatctctcagatatacaaaaaacacactaactatgcatcctcccctcaggggtacaaaatacaagcataaccaacagaaaagagtcatcatgttctcaaaatatatgcctaaggttcccacagaaccataccagagctcgggcctcttgccctgagatccaccatctactcgctgagcatcacctgtaaaacataatccccacacacggggtgagatgcaaatctcagtaaaatcaggatttttggaggtttttcctccccctagttcacttccatgacacatagtattaaaattgacatatcacacaacaagccatcacgactctcatgaagcatatcacatgtatatcacaacacaggtgtaacaatatatatacaaatatataacattgcctaagaaagattattcactgaacgacacattctctcaggaacttttcgcatcattatctgagaaagatcatctacttaagggcacattctctcaggactctgcacacattgcctgaggaagatcatccactgaaggacacattccctcaggacttcataccaatgcctgagaaagatcatccactgaaggacacattctctcatgacttacttggacatgtatgacacttccaagggaagatcatccacttaaggacacatttctaaaggaagtccataagtaatctattctactggtcagagaatctcatcaatcacataacataccatcacagtgtacatcatatacatgttctcaataaaagcagtaacacacaatttcaatacacatgcatcatgacatacaataaccatcactccctcggagtatggtggaacacagtcaataggaaacactcccaagaagaaagaacttacctgctctcagcgctatatcggctctcttggcttcatgatcacaaccaccagtagtatccgtatcacgccctacatgaaggcatacaaacaatcaataacggttctcaaccattagaatgaaaagaaacattattcttttccatttaaacctcttagtcctctaccttaaggttatcagaactaaccacctaaaagtcaactcacataccctcagcaggatctatctcggcctaaccaagtcactagagtctcccaaagactctgcatcaaccaattcagagaattcaacactatacaggccaaaacccaaggattaacaatatggctaaaacggttacttcaacacaactttaccgtttatatagccccttgagcacatattgtacaaacatcagggctcatgcatgtcatacaatcaccaatttaactaacattcttcctacacatacatttctcagagcaaaattctaaagtccataaaatcaatattttaaagttaaatcttcattacaacaacctcctaagcatacttttataaagaactcaagcttaattgcaactctaactccaatgagatactattcacctcaagaacaaattcttaaataattggtagaatttgtgtttcctacctctaaatcgacaaggaaggctagtggacaacttctccactagagaaaatgatatctctgtttgatggtttttaggaaaaagtgatgaaggattctagctcataggatgatttcctacaagtttcatgttgggtgtgaagtgttttggtcaatggttgagtggtctggagcttctcaagctctttaatggaggaaaacgtagtggggaggaagaagataggtttttggtccccaaaaacgcgtgaaatgaccttatatagtggtctagatcgtgccctagcgctgatcgtgctactctggcgctattcacaccaagttccagagaaaaacatgctttctggagtacttctgacggtaaccgtgccaacttccaatatatcttactctaatcacgtcactctggtactaatggtgccagattttttttttttaaaccttagttattataataaattaaaaaaaacaagaattaaatatgtttgtataagataagataaaattatgtgtattctatttcctgttatatgataaaatatgtataagataagatgataatagaatcataagataagataaaatatgtattcaatttttcaaattacaatgatcaatttaaaattacaaacttccattaaatcaattttcaaattcatatttcaacaaacctacttatgtcttatataaatttcaaatttaatatatatatatatatataacgaaaagttaaattgtataacagtaaataaaaaaataagaattaaatatatttgtataagataagataaaattttatgtattttatttactgttataagataaaatatgtataagataagataataatagaattataagataagttaagataaaatatatattcaaattttcaaattacaatgatcaatttaaaattacaaacttcgattaaatcaatttctcaaattcatattttaatacacctatttatgtctcatataaatttaaaatttaatatatatatatatatatatatatatatatatatataaccaaaagttgaattgtataacagtaaatagaaaataagaattaaatatgtgtataagataagataaattatatgtattctatttactgttatatgataaaatatgtaagataagataataattaaattataatataaattaagatataatatgtattcaaattttcaaattacaatgatcaatttaaaatttagaggaaaaaatatatttaatttgagcaattaaaaatatatttaaaataaaaattcaaataataatgtacaatgtggtaggattttcataataataattcgaaccaagtcataataactcccttatttgcaggtggtttggagagggtggttgatgtgttgccaacctaattaaaatttttgcaaccatcttatactcttcctccatgtgtttattgatttaaaaaaaaatcataacagcaaatttgagtttttcagttttcaaattgttttattgttggtttgatcgatttcgatttatttggatctgtttgatagtttaaaagaatttagtttaattgtaagtaatgctatttatcaaagacatacttattaaacttaaaattaaaactaacatttcgaattattttgaatacctgaatacatatcttatctaatatataattataaataatctcttgtcaaatatgaaagagaagagatatcatcctatttgaaaaaaaattattcattcaaccacacactcccaaaagctatataaaactctcaccgctacgtcatttcattatatgcacactttcattaaaataataacttggcaaactctctccaggtaaatactcagtttgaggaatggtggtttgatccctctcatatgtaatcacggcttccacgtgcctgcctatgttttgaggagatcgcaacgaatgccattcaaccaaaactcttttatcatgtcttattttccccttatcctgattcttttttcttttttcaatttttttgctttaccattttttatagttgcgtatccatccaacgtgatctgggaaagtcgaaaaaaggatttttggtttctgtatgaaagagggtattttgtaatttgattcattttgattgggatgatcaacctttggtggtggcgatttcttcaactttgatcaggaaattctttcctttttttgtgtgtgtgattgtagaatatcccatcatctgggaataatgtacttttaagttttcttctttggattccttcaccttatttccatcctcaattttcttcatatggttcacccttaatcaataaaatgtctgctttagattttttttagtttggtatttatgaaaagtaaaatctttttgcgatgatcctcagtttcatcactaaatatttgcctttgtctttgatttataatgccattgtaaatggatacagaaaatcatgtaattaacctgtgtttaaaaaaaaacaaaaaactatgtcacatattcttgaggtactaacttgtagagtttcagatgctttagttggagaaacagaaattaatttattaatgcagtaatccgtttgcacatattttcataattaccagaagtgctagatcctctcttctgctctgtgtgggcactgtataagattcgcagtgccaatggatgccactaccggtgaaaccccaactatccaatatcataacatccctgatcagccagctactaccattgttgccacccaattgccaacatttcaacggcagcaacgccattgcttcggggattctagtccaggagagtttcccttgtctgcgaacccctccattgtccttcatgtccttacaacatgtaacttgtatcctcaagaccttgctaaacttgaggcaagtgctgtgcttgtatccatttcagctcttaagttgttaattgaaacttgtactaattctaatactgctggtttcatttctgatgtggtgttttgcaggcaacatgctcctttttcaagcagccggcaaactttgttcctgatttcaacttgtccttgtcagagcttgctgcattggacatgtgccagaagaaagccatttttaatccaatgacaacagaacaacggcaacatttgaagcaaagatgtggcggttcttggaaattggttctgaggtttttgcttgctggagaagcatgtggtagaagggagaaatcacaagtaatagcaggccccggtcatagcattgctgtgacatcaaaaggggttgcttattcatttgggtccaatagttcaggacaacttgggcatggcactactgaagatgtatggcaacctcggccaatcaggttggaactttagttaatacattatcatactaatttaagtggaaagtgaactagttgaatttaagttaacataactcaattacgctgcagagctttgcaaggaatccgaattatacaagccactgctgcgactgggaggacaatgttgattagtgattctgggcaggtttatgcctttggaaaacaatcttttggtgaagctgagtatggaaatcaagtatctaaaatagttacaactccacagttagttgaatctatgaaaaatatatttgttgtgcaagctgcaattggaaactatttcacagccgtattgtcaagagaaggaagggtatatacattttcttggggtggtgatggcaaactctgtcaccaaactgatccagatgatttggaaccccatcctttattaggagctctggaacacataccagtagtgcaaatagctgctggattctgttacctgctttgtttggcttgtcaaccaagtggaatgtgagctacaacttaatcttcttatctcaactttttcaattctttttccacaataattgaattgggatgatgcaaattaggcacttttacatacttcatttttttgtatgcatattaatgtttgtagagtgaaaagagaacttttttgtattatgatttattccttgattggcatcatatatatcttccattctgttttcttcaattacctacatgtatttgcatcataagtccacggcttcaagatttatgaaagtttttaagcattgctgattttttattcttaaataaactagtatttacattcgatttcatttttgttgtaataactatctatacgtttattgattacgtgatccttctctgaaatcttaataggtcagtgtactcagttgggtgtggtatgggtgggaagctcggacatggcacaaaaacggatgagaagtatcctcgtttgattgaacaattccagttgttaaaccttcagcccatggtgattgctgctggttcttggcatgcagctgtggtggggcaggatggccgtgtttgcacatggggttggggccgttatggctgcttgggtcatggaaataaagaatgtgaatcagtacctaaggtggtggaagagctgaaaaatgtcaaagcagttcatgttgctacaggagattacactacttttgtagtgtctgatagcggtgatgtgtattcatttggctgtggagaaactggcagacttggccatgaccctgaaaatcctgagcaggtctacttgcttatgcctctccttgtttgatttgtgaattgcttgtttggtttggttcaaaggacacgtccttccgctgattttttaacaattatgatatgatgaactggttattgattactactttacaataattggaactttcagaggagttccaaactgaaccagtttcagaatgaagcttctagttgaagcatagtgaaccatagatgacatttcttgtaaatgccttagagacagggcacaagtagcacaaacctaattttatattggtgactctagtgcattcattctattaaggttaatctttccatgtcaattattagttagatacttttggagacaaaattgttcattcagaaaatcctaataaaaatgaagttaatcaacaatatcatgtatgtacttgtgcaggaagccatgcatacaatgtgtgtgttaactccaaagctagtcacttcgatgaaacagaactatgaacgggtggtacaggttagtacgaccaattccatatggaatgctcatacacttgccctaactgaatcagggaagctatatgcctttggggctggggacaaaggacaactaggtgtagagattgatgctgcctaccacactggaagaggaaagccaaagcgggttgatattgatctttgttaactatgtgccggtgtatgccaattatttacaccatgtcatcctttaatttatgcttaccatgcatagcatttagtgttttaatcctttgttgattatgtaaatagaaccaaagaatgcatcgataaggtccaagcttggcaacatataacaagagcttcactatttgtgcggttgttgatatcaacgtagacttcaaatagatcatcatagttgaaaatggtgaaggttcatatgcagtttagttgtcttgacttttgaatttggttatcctaggatcatttgcttagataaatttggtgaattttacagaattgtcattcactcgatatcaccacggctcgatttagtaaacttttattaaagtcgaagaggagcacttttcctttatttaaaaacaatggagatgtttaaaattgtgcatattaaaagaagaaaaaattacgagtcacattatgaagttgtgaaaaaataggtaattgagcatgattaagaaaagagattagaattgcgaagaatttatttgattttatactaggaactagaaaggtttatgatagaagtcgcttatattttatgggggctgatgaaaatgtattaaagcaaagaaagatttgcatataatttttattgatttgaaatatattattaagtgtctaaggaagtattgtgaaagattttaagaaaggtgttattgtgaggtatatatatctaagctacacaagacatgtatatatgatagggttattattaatgtgagaacttttagaggcaagactaaggacttttctagaaggataaaattacattagacctcacaaccttgagtctttttgcttgtttaatttagttttggaagtacaacgcgtataaaagattatgacttattgcataatttttgtagattatctagttttgattgaagaatcaagggagaaagttaatggtcaacttgaactttggagactgctaaggattttcataggagtaattaatgctgcttatgtatttatgaattatgtaagattgaaaaaaatacttcttgcatattaatctgtaaataacttgttatgaattatggaataatttgtgaaatagattatatgtttattagttcatatggtgtgtttttaaaaaatttaaatatatatatatatatatatatgaaggattaaattaattatatcgtgtaattttaataattattacacaatttttataatttgatataaaatgtgatttttattgaataaattattgaattatatctacatattatcaagattatttctattaaattttgtcataattgaacaactaaaagatgatctattttaaaatatttatgttaagtcgattttagtttatatgaacgcaaatgatttttaattaatatgaaattttgtatgaaatttatgtaaaataaattttgaatccaataatgagttttaagattatattatgaagttgaaagttataaaatgatataataatttttaaagttatatgtgatttaatccctcatatatatatatatatataaaatgattttaacctaaaataaaattaataataacatttttatgatgtcctttaccaactaataacctttttagtaaagcaaagcactgttttctccttttattaaaatgaagttaatttatgcaaaaatttaaatattaaaatgaaacttaatttttttaaaactattaataacttttcaaaataaaataaaaaatttattaaagtttctgtaaaaatttcattgtaaaaaaatatggcagatcaacagagtactttatttcctacaaaggattcttttatgaattacatatatctttgatttcataagaaacaattacattgaagtcaaatagaatcgtatattttcaaaagaatactattaaaaaaagtagaatcattatgaataataattttttaggatttaacttagaaattattaattaaattagaataactttacaaatttatccacacactttcgtatgaatgaaggaaaaattctgttatttaatacatggagggaagtaaaattaaattttgtagtaattaatccttttcctcgtgtgtgtcaatcaggaaaaaaaagaaggttaaaattgttaaatacaagtaatatatccctatataaattttgttattagtttattattttatttctcttctttattataaattagaattcttacttttacataaaaatacttcctgattaaaccacgtgacctttccaacatggaatattttatttgaattctaataagtcatatatataaaagataatatatttttggataaattgaaaaattattataatcttaattcaaacttaattttttaatttaacatattatatctataaatattttttgattcaaatcattcatttctataatattattttcatcttaaaaagaatttaatcagaatgaacaaataatataactattttttcagagttatttaattataaattattttatatagtaaggatgtttgactttttatattttattcatttacaaggtaaaaagtcttttcattttcatgttgaaagtgtattgaaattaaattctttttaaaatcttatctctttaattaattaatcctcgtcgtctaacaacaaaataaaaatattgattatttttatttgtagaattgacttaaaattcaaaagatatttatacaccccagaaaaaaaaacatgctaatttatgaacggccagcaaggatcgatgtcccctataatattctttgccattgttgcaacttgcaatgtcacttgaaagggaataaagatttatttggcacaccataaatatagaacaaccttaacaaacaaacaaatccaacaacgttgttgtgttgtttccctcttccatgcagagatcgatcatcacattcccatatatagtatatatattccttaccttaaatagcaaaaaaccgtaaccaacggcttccctcacacattaatagcaaacgtaccctataatatatgaaccctctccttacgacctttccgcaaccacaatatattccttgcattgcagagtttctctaatatttccccttccttagagaaaatctgcaaaacaaatcaacaaattaattaattatttttcttaaaatatggcacgtgcacgccgttttgtggttcttgccgtggtgatgttcgccatcattggcttggcctgtgctaagaatccagcaccagcaccagaggcctctgccgatgactatgaggacgatgattactccatcggagccctatccagtgaagcggcttctgctcccaacagcgtcgtggctgcacccattggtgggcccgtgcctcccggtgctttcgacaatgctaagggtggttctccttccagcgccgctgcctcttcctccctcggtcacctctccgccgtcgccggagctgcctctgctgctcttgccggcttcttctacttctgagttctcatcatcgccgctccgaaggttgcatgcaatcatgcaaagatagtgcatgcaaatatataagtgtatttaagtatattgtaattcaatatacagaagagttaatattaaaatgttatttcaccgaggtggcaagcacgcaagatgtgagattatttcaacttataaattgaaacttttcaatttaaatattaactattcaattacattaaatatttgaaaagaattttttcagtcatacacgggcttatctagcttgaaaaggatcaactaaaagtctaaaatatatgtgatgtaaaaaaatatattaaaatgttatcgaaagatttataattatttcttgtgataaagaagacccgggaaataacctagattagttatgccaacctatcactgtatacttgatttgttatatatcacttatcagttattaattattgaagttcacctgtaatgaatgtttaaactttattataaagcttcataggcaagataaacaaaattgtctaaaattgagatagtttagggtttagagttattttatgaattataataacacgtgattattttatgactttcaataagatttagggtttagagttatttctcaattattaaaatgttatccaaaggtttagttaatttttcaaatgcatctcagattattaacaaaaagggcatctctattttttctcaaaataaaagaatatgtataaatataatgttataaaatgaaaattttattgcgttgtaaagagacattgaggctccctgacagatttctagaaaatattatcatgaagtatttgatttaactgattttgataaataatttagtggtcttttgaggaaaacaaattcaaaatgattattttttttataatattctcatcgatgagaaagaactatacgaacaacttcaaacttctttttattttagatatcattgtacacacatgaattaaatattccaaggagaagaacacaccttacatatcaagacatttgaggtcaatttctattaaaatcatagattcgtatgaaaaagttagatgaatttttaaaaaaatgcatgataattttgattaatttgttttaatcatctattattattataaatacctattaattaagatatttattcgatactgacaaggaattattattgctgtaaaaaaaagaattattatttgaattgaaatgggaatcatttttaccggcaacaaaaagggtaaaagaatagcaaattcaaatggctaggccttcagccactttcaccaacgggtcaatgtgctaccagaaagaaaaatagctattattatattataaatgttgggagaatgatttcaaattccaatgtggcaaaagaattatttctggctttgataataagtaaacaaaatacaattatacattatgtaaccaaaaatgcaaaaatatatgaatcacgatttagcgtaaacgtaaatctaacctgcactgctgcttattacaattcaatcaaaatgaatttaacttactgcctagaaaagtacttcatggtattatcagtcccatcaatgaacgacaaaaaatgcagaacttcatcaaactctaagctgaacctcaaaagtagcaattcagctcaaccagctttgtcaaagatcaaattctatcaaaccattaagtaccgtctggatctgctggcaactgtattaaccttgtgaaactgacggccaagtgatggaataaaaacaaacgcatattttcacttaatacacatattttacactcacttctgccaccctgaatataggtgggaagaaagcccaggaagtgaattgaggataacgataaccagctgtttcattcaacagtcttaccaaataactgcatcgataatcaactaatatgttgttgatttaatacattcccttgaaaacaggatttgtccggcaaatgcttgctccatactcctcatattctgcctttgtatgacaagcctgcacgttggaccagaaattgtaaaacttgcatcgagatttattggaaggattaaaagaagcattcagaaattatcgacactcccaaggagaatgacattatcacaagaaaacacattgcagtccacagggatgaaaaaataaaaaaactcggtcatattttgcactggtcaagttctatatttctaaacttggcaaacaataccatttattcaatcataccgtaaaaaattcaggtgttgacgcaagcactgatcctccaaaccaaactgcaaatctctggattggattgctgagtacatttacctccactggctgcgactgtaggttccaaacataaaaaagtaaataccaggccaaagcaataaatatatagcagtctgaccttccaaaatacaattaacaaccaacacatcgctaatttcaatggaaaataattacatgacaaggatttatgtaattatttaatacaacataatgatgtattggttgttgattggtttagtccatacaactagtgcaagcaaggtttatataaattataaagaatttagtatctgtctgtgtgtgagaggaagagaatcatctatgtaaatatgatctaaaggtatctattaactcttacttttatctccccattcaaacgtgcttcagataaaaggacacgagcatccactattttttttagatcacgttgcaacctcctgtgaaaatccttgaacatggttgaacctccagacaacactacattctgaagtaaaaaagacaaaataggaaagaggtgaagaattcaatcattaagaacatgtaaactaaaggacttgaaatttatatgatcagaaattaaatatcatggctgggattgtggacttataaatataacatttgacactattgtattccatctggccaacaacaaaaaatgccccaagcttaacattgagcctaagaaaatcactaattttatattaaaaattggttaactaaaatttaaaagcactcttggagcttatttatatacacatcaataagtaaaggtacttcaccttgtataatgacctccttgtgtcaattggcgcagactgaatgcacttgtctattacaactggcaaaggggtggtaaagtcactgccatatatctcgggattaaagaaaatctgcagaaatcatagggaaagcatacagatatattaatatgactgatcctgttaatataatgacccaaactgaacccatggattagctccacaattagaccaaggcactactgtattttcattaattcttcagtagtttagggaacaagctcaagtggaaccaatagctatacatagataagcgctatgaagactcttagagatggagactacttgatcagttcatcccagattcaaaccccaaccagtctacaatgcttgtacttaagcctcccttgccccttcccacgctagttcttcggcctcttttatttttttaccacttttctgtataaccccctctgttaagctggatattaatgataggaaatcaggatctaatcgagtatatatttaattaattcattagttcatgagataggttcaggtactcacaaaggaaaaatcatactaaaaataggtataaaacaagtagccatagaacaatctggaggccccctaagagagattcagctatccataatagagaaaatataaagagcagccatagaacaaacctcagggccaagaaatcgttcatagccaatatcacaggaatacggtgcccccgtctttggtttaatgcctctccagtgcttgatatacttggctggctctttgtcatgcttattaaattcctgagagaaaatgagtcattgttatgtaggaaaactaacaagttcaaaagataactttatttacatcccttgattcaaaaaaaagaaaagcaaattaaagtagtgagaatttattgacactcgacatgctaatggcagaggcaacaaaactattggcagagaaattcgacaaactcctcaaatgattctgtcaaagaattaaagtattgaactaaagaccaccttcacaatgtcagagcaggtgtagcaatacatttccttcactttccgtgccacttcaaaagagtcttctggtggtacattctctcctctttcctgcacaaagcgatgtcaacacaagacagttcatgaatctgactttagcaaaatgcagattgacaattggatatggattattacaatctcagtcagttcaacaaaaatttatagccgaagacacaaataagtttcatactcaatcatgaaattaaataagtaaatttcacttctatttattaactacaaaaaatgtaacaataatactatcattttttttttgatcggcacaataatactatcataagtgcatcacacactgttcatccatgattagcatttatacatgattgatttcactagctatgtaaatggtagtttgtgagatccttcaacattaacaagaagaggtttacagaaattttacagatattcaaatatgagaacaataacagcacaataaacttttaaatttataccacaaggatttcctacccgcataagctgctgcacaaaaagagtaatatcctttccagaaataggaatcgacttgatgctactaccaataacatagccgtctgcaacgggtacaacatgagcagccccatctccaacatccactacaactcctgtcatctcgcactacgaagaatttcagatcagccataaatgaaaatattcttaaaataaaaatagatataataagaaacaaatatcttgatagctcctatggtactgttatcaagttcaagtaaaattatgcataaccaacttcatattctagattttatattcaacataatcgggggagctgataaattatcatatgcgcatgtaataatgcaaaacaaccacaactgttcatattctacagtattgttcactcttggtttcaagtgaaatcatccaaatgtgtcaaattgcaggggctgatgaaacatcctgtgcattttgtgtttagataactaccaaatgtgttgctgctgagatcgtattaaatatgtaaagcactcaagataatcatccaaatccaattctatattcaacataattcccaaaatcaaatttcgagtgtagctgtgtaccaattaccaaccttagatgttgtgtaaccagctgcaagagcaagcacagaattcacaccaatgtaaagtccaggtacgttaaaagtctcaaacatgatttccccagtatactcgcgactctcaggcgaagtcaatggactctccgtcaagagaaaatagtgatcctctggatcacacctcaaatagttgaatatgcactgctgccagaagcgctccatggcatcccaattctcaacctggccatgctgaattgggtagctgagattataagtgctgctagatcgagatttggagagtgcctcatccccaatgaagaaatcaagatctgccattacgccagcattgtgctgggcaacccaattgcctttagaggagtttctcgattgattaagaaaagactcgttaattgcaaccactgtcggaacattaaaacatggctcaacattaccagcaaaccccattttagtatacctgcaaaaaaaaaaaaaaaaaatcatttccaaattcaggaattcgggtcaatgaatattacagacaattctagtcctaaaactaagaaaaccgcattggagcatttcaacaaacacatggtgtccacatattgacagaaaaaatagcataatgcatagaagggagattgggtgatagaaatggaggaaaatggtacccagagccattatcgatgactacagctggacgagaagtagagggatccatgagaaagattgaaaaggtggtgaacgttgaaggtggatctgcgactgagatccgagagtgagcgtgaagcagaggatcatggtcgtgaaaagcggaacaaggaagaaggtgtaagtgatggtgacagaggctttgctcccaagtgaaagaaggaaatagacaaattgaaatggttggtgattgctacatccatctcaactgaaaggtgcaggtcccattaactcgatcatcattctgttcgtttccaaaacatgctttaaacaactactttccttctctctctcctagactctcttgttttcttttcagctagatgatattttggtataatcacaatttagttctttcaaaaaaaaaaaaatcaattattaaatgtgtataaattatgataattacataatgtgtaatgataaattaatatttaatatttaattagttttaaaatatatattttattattaaattaatacttacatattataataatataataaaataatctcataaatttaataatagaatataattatcttattatttacggattcataatttttattttttaaaaaactaaattatgactgatttatcatttatatattcagcaataaaaatgatgaatcagtatttcttttctgttttttttatttttatcattttaaattttaattcattaatttttgggttgcctctgaaatccaacaataatatggatgcattgcacggcatgacggcaaattcatttttcgttgggaccaacaaatggggttacttgatcgatttgaaggacttgttgcgggggcccacctaaaacaaatattctaagtgctttgtaacttttttttgtttcctggtactttgacacgaacctccatcaagaaaaaaaaaaaaaaccgtcggtagtttttaatttaaataaactttcaaaaatataaattaaaagaaaatatcttaatcttaaaatttttattcctgttatcgaaaataaaagttttattcctgtcctatattataaatttaaatatttgctttaaaaaatgagactactgttcttttttttttcctgtcatttaattcacttttatattttcttttatcattatatagtagtgaatgttttagttttttaataaataatatatccattgacaattttcttcattatcatctaaagacaaatcattctattcactattaaaataattatcttaaaagttatattaaaaattatttctaatttatttacatttttaaaagaattacactaaaaattatttaacgtacataaaattttattgcaagatttaataacttttgtttatttttctatcatcatcatctttattattattattattattaaagtaaattacactctattccctttgttttgtcaaaatttcactcgaaagtcctcctttttttgcaacttataaaatcccccttaatttttttagctcacattccattcagaccctccgtcctaaacaccatttaataatttaacagaaattagacacatattggtcatataacttttaataaaattttatgtctaaaatactctcatattcttcctcttaacctcaaaatattttaagacttttgcttctttttgttttctctgtaattgacaacattgcatatatcacttggttcgtctggttggttcgtaaagtgaatcgaaatatccacattgcctaattcaggacctatgtatttagttcatccattgtgttccgttgatctcaaacatcagcactattttaatcaacaataagaaacaaatgtttttccgttcattcattgtatttcataacatcaacactattttaattaacaataataaacaaatgattttaaaaatcataagtggtctcaaattggtctcccattgaaactccattcagaaataggtaataataaacactttaagtacctagcaattattctcctgatcgattactacaatttaagactttaagtacctagcaagggaagcaataataattacaaccagagtattttatatgccctaagtgtgatatagacctagtgcagcgaacaagtgtcagggtatcacactatcaccaccacaataaaatatttcacttgtgcagcgaaagagtatacaagtgtttagagtatcacactgtcaataggtaattgcaatatacaatgaaacaaacaagtgttggagtatcacactatcactaccacaataaaatatttcacttgtgcagcgaaagagtaaacattctcagcactaaaatacacatgcaatatagacatcagacatccattatattccacctttgcactaggtagttgccatacactagacaacgagagaagagtatcgcctctatcactgatcgctagtaaagggaaagagagaaatattctatggcaaaatgctaatagaacctgtccatagaaatcaacctatcgtcttatttttacttgtaccacagaaactaggaatatccataacaaatacatgattccatccaataggtaaaatctacataaaaaaaattacttactgcatacgtgatttaaatgtagttaccttatcataacattaaccatcgacagaaaagcagacgactcaattagctcatgactacatataccacagagaggaagttggtgtctctattctagaagttcttatgtacgagtaacaattcagtccaattaaattatagcctgtagcgtacataacaatacaggtgttggattgaatttcaaatattatttaacaaaacctgaatttggaaagtactacttcagtgttttttttgtaatagatagaatgcaaacaattatgccacacagttcacacataaatactcaaattatatataaaaattaaaaaaactcaaaattaaacacatattcatcattagtccgtagcctaaacacacaatcatcataaatgtaatgcataactaataactaagcagtagcaagagtcatcaacttttactatgcacacttccgtaaaaagtactaggaatgacagaatagcctgcaaagtgtgtaaacagaggcaggccagaacagagaagagaatgcaaacggaagtgctgaccttggccagaaaatagaagggtcgaagattgatgaagatgagcaactgggtttagtcaaaagtcaacataaaactaacagggttttgaagaagagaatgtgaatcataaaagtaaccctaaaagtggattatggatccgaagagaaggtggaacaatcatatttttgccacttattggtacagctgtgctgtctactgcaattcagccactatccacccaaagctaggagttccctgaagtgtctggcagccacaatgcgcagccatagcacaatagtggcaccccagtattcactattctgtttaaaatcttctatcatagactgcaaaagctaacaagaacatctacttgtattccaagcacttgcctatgattgcaataaagtcaacaccttagcaagagttaaacatgtaaaacatcattttgatacttgcttattccagttggtattgccacttcttcataattcctcaatggctcaatttaacctcaaaaatcctgtaggacaagtatgagaaagaggttgatgaaagactgcggacaatggtttgatactgattctccactcttcaatttacttttaaacaggccaatttgtccagttatacttgtatatctgaataaaccacaaacaatgagggaattgtagagcaagtaagactatattcattattcaggagaagcaacagcagcaaatgagttatgcaccacagtcagatcaactaactagagattttagagacttttactccagtcacttcaacacatgatccgatggttgaattccaaatctcacactttcaatgaaaaataaaaggttcaagtatgactgcaacaattcatcaaaacgcttaaaatctggttcataaatcataacctgagtgaagtgttccaacaattactgacacatagcagtttatgaaacaagtgcatgtgtagaggaacacaatagaaatccacgcaattaaatatgaagtgctcgggagtaccagaatttattcgagcacaagaccattgcattggaaaaataaaagcaaggaaaattacaaagcaaaaggcagcaaaattacaacattcgaattcaagaaagagaatccttctgactggcctgctgctgcaataattcttctctaacccttctgatctccgcttccttctccaacctctctttctgagacagattaccatacagaaagagggtaaaaaaaagtacaaaacaaatagcattcgtacttagagatacaggcatacagcacagatagatcaaataacacgaaccattgctgaaaggttcaaaataatgtatctacgaaatggaatcctaaaatagagttaaattgagttaggtaggaaattataataatcatatgttagaagatatctcgggtttttttcattggaggagagtgaaattgagagaaaggaatgaaccttttcgtcttgacggagagcgatccagacatggagcttgtccatggactgccagaacacgaaggctcccagcgtcatcgcgaagtacgtcgccactttcaccatctttctttcttcttctctgcttcgatttgcttttagtctcagaatctcctttcttttccccttgtaatcaaaatctctgttttcccctcttttgcgtattaagatggaacgagaacgagaatgtgacgtcgggatccgcagtttgcttggcctcgtccttactgtgtggcccaaatcccatgcgaagcccggcccattattttcagtaacatgcatctgtctcatgttgcaatcgggactcgggaggatccttcataaattgatcgagaaatcaattcataattttatcattttatgtttcttctattcaatattagtaagtaatacaagcatgattaaatgcaattttggattcttcattttttatattcgtttaattattttttaattgaacaattttagttcataaattttatcattaaatttaaaaattaaaaccctctcttagtctcataacaccgtaattgatttgtgagtgcatttcattttttacataaaaacgcagttaaatattacaaggaaataaatgtaatcaggaattagtgtttagtcaaaccagtgagcgtaggaagatagtaatcaaatgttctgatctttttgaagatatatttcttgaatgaaaagtgctagtaatttataatgacagaataatagattataaaatatattgtttgtgaggtgttttacgtctggaccgatgtgagcctgtttgcttaacgtcaaaataaaggtcatcctcttatccaagtaaattaaatatatctgcgtgatgaaatcatgaaaagttttctaataatttggaggcttgtgcctgttttaatatcacgtttggggactcccattggcggagtgtccggtcttttgtctcgactgtatctacaagactgcgagtgtgcgaagtgtaaaatatggccaacttgcgctttgagatggtagctactcatcaatttttcttatgaggtgacattgcatagaataattcaaaaagagcgagcttcccagccaatagaagaagaaagaaacaaaaagaaaaggaatcaattgttttggcgttttcccattgatgctccggcaccacccacagtaaatgctccatctgtctcaatacacacttcaaaatgcaatttaaaaatcgttgatcgttccctcctcttacccttttttctcttgttcgtgtcaccatttccacccgcttaagcaaacttttccttttctcctctttgtgattctcatctttattttgcagtgcctctctaaccacgttatctaaaacagaatcatgcggatccaatggtggctaaagacatgctcctccgccaactgcgccaccgccacccaccactcaacaatctcatcactccccaaacaaaagcaacatgcatgtgatgattctatcagccactcctccatttcagaagcaccatcttcaacaacctccaacaacagcacttcctccctcgaaagcaacctctccatacaaaccctcccatccgttccctctctccaaaacctctctccacaaaccttcaccttctctgtctcccaccattgcgtcaccaccctcacgccacacccttctcaccccgtcacctccctcgccgtcaacaacaacctcctatacgccgccaccgaccacgaaatcaacgtctacgaccgccacacgtgcaccaccctccacgccttcaacacccaacccacctccaactccaccaaaaccatcaccttcaacaataacaacactgtcatcaccacccaccaagactgcaagatccgcgtgtggcaaaaccacaagaaccaccaccacagcatggtagccactctcccaaccgtcaacgaccgtctgcgccgtttcctcctcccgaagaactacgtcgcaatccgccgtcacgataagcggctctggattgagcatgcggacgcggtcacggggctcgccgtcagtaacggctctatctactccgtttcgtgggacaggactctcaagatatggcggctctctgattttcgctgcgtggagtcactgaaggcgcacgaggacgcggtcaatgcggtcgcagtgtccaacgatggaaccgtctacactggatccgcggacaggcgcatacgcgtgtgggcgaggcccgagggagagaagcggcacgtgctggttgccacgttggagaagcacaagtccgcggtgaatgctttggcgttaaacgacgacgcttcggtgctgttttcgggtgcgtgtgaccgttccatattggtgtgggagagggaggacagtgcgaaccatatggtggtgagtggggctctgagggggcaccagaaggcgatactgtgtttggtccacgtctctgatttgcttctgagtgggtcggctgatcggacggttaggatttggaagcgcgcttatgatggacggtttggatgtcttgctgtgctcgacggtcaccggaaaccggtgaaatccttggcggcgattccggaggagtactgtcatcaaacttcacctaaatttagcgtctcggttttcagtggctctcttgatggacagataaaggtttggcaggtttctatcaccagtcagtcatgataatgatcgataattgatttcctagaaaattgatgatagcagaatagggaaaaagtagagaacaatgaagaaaaaagtactgagtaagaaaatatgtataagaatatgacatttctgtcatgatttttgtgatctttatgatagcagctataaaaacacaaaccaattcttttacaacacttttttttttgttgtctttccattatttcttttattgtaaatttcattgaataaaggcaaaatttctctttttgtaaattttggaagttatgttagatcaattataccttttttttaaaacctattttaatattgacaatgtaaaatatgatggagaattgaattcctagattgcttttgtcgacgttaaaaatttagggaagggaatgatgtaccaatttaggacaagaaaagtcttcaaactcaaaaaatgtttaaaatttgtgatttttttttcttacttcactcaattactcttgagactaaattcctataaaaaaattagtgatagatgaaaggaaaaataatgaaaaaaatattgtgtcgagataggggtgaaaataggtcagaccatatttgattagaccgtgatttaaaaatataaagattgatataacctattcaaaagtttggtttgaattatggagcctattaaaaaacttattttataataaatgttatatataaataaaatttaatgattatacatttaaaactttgaaaatttgcatagtactttttaaaatttaatataaataaagacgcatacttttcttttaatttgtgtatgaaaaataataagttaaaattaattcgagcacttttaagtattcaataaaatattataaataaaataagcaagttaaataaaataccataagttttatttaataatctagtcttaatgtcaaatactaaaataaataagaaataagaaccaaggtaagttgaagaacattttttaggaaaattaattttacaaaacagtttaaatcaatttatgaaagttaatgaaacaaattttaaatagaaaatatctcaacttcctacttatattttcaaataagtaataatcattttataagattttcaaggtgattttttgaagtggttcatcattcactttcataataaagaaatatttttagaaaaataaatatattatttttaaatttatatatatatatatatattaaatagcttagtctgacaagtctaacattttttttttagcttgagcttgatcttttatttaaacatacttttcaaagagttttagtctgatatttataataaataagtcatgttagaacaaatgtcccttatactcatttccatccttaagttagtgttaaataagatagagcatacattaatattgtaaataaaaatacactattgtcataatataatcttatatgtatgataagtttattaattttttaaaattttcttaaaattcattcatattataattttttaggaaaacaattcatgaacaccttgttgatgtatacatctcaccttaaagagaaaatataaacaattaataagatagagatggagaaaagtaaaagatattcatagaatgtttgtaaaatataggtgttcaaatattaccacttaatgtctaattaattgataatgtaaaaagttaaaattcattacatcagtatgtggaaattaaactcttcttttatattttttcactagttttatttatttttattgtataaatataatctctatgtgttaaaattgtagaagcaagatcaattatacccttagttatatttttaaactgatttgatattacaatatgtaacgggatctttgtaaagattgctattattcatactttataatgttttatacattcaccatttatctttgtatgtatgtttattatataaacaatatactttgtcaataggatctcttaaacaaaatcttaggataaaattttgtggaagaaaaatatgattgaaaaaaaaacttcatcagtcagttttttaaccaaaaacaattaatcatcatcaaattcaagaaattgaactataaaacactttattctctttttatcaactatagatacaactactctttaagtgttaaattacttatcaaattgagttataagatatccattatttatctattgtaattgagtttcgatataataatttataacaattcacacactatttaattaattgaactaaactatttaatactatttgttcatttacttgcatcaaaacttgtgtgtttatgagttgttttttaatcagtggttgaaaatgagttttttttttttactttatgtttctctatatagcaattaattacggttgatcggttgtaacaattttctttatgaaaaacttccataaaacattgatgtttaatatttatgttatctccttattcgtgtaatattttggagattcagtgcgttcagaactatatttttgtgtgtcattttatatttaaaattaatatttcactttaataactcatgggataaagttttatattatatgttaagattgattttcaatgtgaatttataacttgaatttaaaaaataatactaaaaagtatagttataagttagtggaaaactatttaaaattataaaatcatgtcactaattggagcatgaaataatttatgaaatctttgacatattttatcattcaattatcataattttgtaaatttatcactgaagttatcttttatgaattttatcacctattttttttcgcattttaccattatagttttcaattcaagcacattttattattttgttggtgacaaaacaacatcatttcttgctttcttgctttctcctttaatttttatgtcatcatatcctattccagttgtagttattgtgagagtagactcaccatgtacaagtttaagtcgagacacaatgtattcaatttctgatccatgttgatttagttgatatactttgacttgccaaacaacaactttgcttatggtgattggattaacaaaagcttgtgatcgggatggagaaactaagaccacaagaggatgagctagtaagctctcatggctgtggtagagggcatgagatgatgaagagagagggcacaagaacactaacgtggccctcgattgcctcattttcatccatcacatcacctaccatgacagcttcctccttcaaatctgaaatttccaaatcaacgattttcatatctaaggaatttttgcaacttggatgtttgttgttcaatgttttgggtttgttgggagttaagtttaaggggttttgaaatacgtgttgacttattgagaaatacgaagaacttatttggtgattaagtttcagtgtctactttgttgttggatgtttaattgtcattttgttattttgggagtgttggtattggaaggggtttaatgacatgcttgtgaaatatgtcgtatctaacgtgtttttcttcttctttcatttaatggtttttaactatcataaattataagttaaaattataaataaataggatagttgatgagttgtagaagattgtattttaaaatttttaaccgacacagttaatttacaacataaatttaaaagaaaactttttttattacgactcaatgcaaacaaaaaattatagaagacctgaaataaaattcattttttataaaatattccggacattatttaccttatttcttgattctgacacttactattttcatatgctatttttatacttctttttcatgcaatgtgtatgttaggacttctcacaattatttaatggtgatacttttattgttgttggttggttgagcaaaggcaatgtcatgtctcgaacttgggatcaattgtgacattgtaattagcaaaccattaaattggaccatagatagacatcttgatacttttattggaagcctataattaggtaatttgtctttatcacaacaatcttatggactttaaagttttttcccctgatcaattaagttttgaaaaaataaataaatagttttgtcttttaaaaaagatgttttttcatgcacaatgaaaacaaatataaacaatttagttaatattgtttctattaataaaataacatcacttacatttttagtataacaggaaagatgatttttgtgaatgaaatgtaaaaaaatgaaataaattatatggggatgacagggtaagttgaaattgccgagtcaacttgcttaagtaaaaaaaaaataaaaaataatagaacattttagacgtttcaacccactaacttatctaacctaatgtgttgaaggcaggtggagagacagactaaccctatattcaagtcaaaattaaaagaatccaaacaaaaacaaccttatgttataagttccaaacaactatttaagtcacctctttgacatctattgacacctttcttcctccagcactatctcttctagtcattttgtcttggttaataatcttatgaactggtttttctttggatggtgcctgttcctttttgttttcaattccttttcatcagtcgattatttttagcaacgtttctcagttcctctctccaacattgttcttcttgggtgttccttctccagcgaggacaagtatgattatctttccattctcctcttttgcctccgcgttcagacattttggttttgggttgattcacattcacatgcaaatgttaaaaaatgatttagtaaaaataaatagattttcacatctctaacataagaaaaaaatatttctataaataaatgaaatgtattattatattggatacagtagataaataatgaaaagcatatgaaaaaaatagattaaagaataatgaagatgggatttaaaaagcagggtttaaaaattattgaaaacgaggtgaaaaatagagtgtacattgttttttttaatgaatgaataatttattgataatgagattttgtattttttttatataaaaatgcatttttgacgaacaaattaaaagaaaatataaggaggtattttcgtaataggaaggtgtaaataacaacagcctggaacccaaaattaagttgattttttcttatttaaaaaatccattcggttaccaattttttggatctcaacggggcctaggcccaatttggctaccactagtttagatcgtaggcttggttctgttttttctttataaaagcagaggcagaaccccctattttcttcaattaagggataaaccctaacgccgcgaggccaagggaacactcatccgaatttctgcatcaaacattgcttgaactttttgaagtatgttctcttctctagggtttactcgtttctcatttcttcctgaactagttcttctgctattgtcgcttttgataggcgttgcgttctttgtcagtttctatcgccgaaggacgtgtcaacgaaagcgtatacgaattgcaatgttgacctcttttgtcacttttgtgacttgaacagctacgcactatttcattcgtagtctgttccatggtctcgttgtgccattcctttaattcaattatttatttatttatttattaacggttgcttcttatggtgaactctccctgattattccatgggggttgttctagtttccgaagcatatataaattaattcgtcttgaataaccagttttaaacagcgtggtgtaatcttctctaagctacactatgctacctgtcttctggtacatacaattcattactatatattcattttccacaattaagagcagtgtcaatgacgttctaatgaaactaatttttagatttcagaatctgaaaatgagaatttgaaagattagagtaaagtaataaacactgacgcttggctattaaaattgtagaaatggaaacgcctaatgtaacgatacctaaagttggacctaaaccgtcgaggaaagtgaagcttccgacgccgaaggagctgatatcacactatgaatctcagggtatggactcgcaagatgcgtcgttgaaggtcattgaggatcttcagaaggctctgtttggagtcatatcctctggcaaaggtaagcacgacaagctattgactgaatcttctaggaagattgattcaattagcaatagactcactgttattgacatgaagctcgattccaagcctggttatgttgagacttttgcaattgggcttgcctcaggagctgccctcaaaggtattggtgcagttgtgcctcatattattgcccctcttgctcagatatggaactctgtttccactgccattaaatcttccccccaatgatatattagtttgtaattattagttagtttgtagaaatattttttaatgaaatgactatgctaccattttttatgtcattataattcgtgtttccaaaaggcaacatagaggatcttacagaatctaatgaagaaatgacttgaacaagttttgcattaccattacaagcctttacaatcaaaccataaatatgcagatgtcatgctgtctgaattgaaaacctagattaagcaacacttggaattcatacaggaattcaacacacttatgcagtcagtgaattgaaattgttggatgaagatttgctggttcaagtattgaatttattttaagtctaatttactagttagtgtataagtgatatcttcatccaatagtttcaattggcatcaatgtgttaggttccctgttaacacacaacttattaattgaaattgttggatggagatttgctggttaaagtattgaatttattttaagtctaatttactagttagcgtataagtggtatcttcatccaatagtttcaattagcatcaatgtgctaggttccctgttaacacactacttattacacattatacattaggtgatgtgtgtgatgttaggagtttactcgttgcagcagtgatacatgtagaacttttccattgtttggccacattcagcacaggccactttgtctggtatcctaaactggttcctgggagtatcaagcaattgcagtggtgaggggtttggagttcttttatataatcatgcattgctggcaaaagccctttatcttttgctgcatccctccattgctcatgttcgtttaggcactttagaaatgcttctcctttgccctgtgccatctttcctgttccttgactaatcacagcccatcctgggtcaccactatcgtaggttaggattctcattacttcatgcattatatggtggttctgtactgttttactctgctgtgatttagagtgccacatgctctctagcctaacccaaaagaaccaaattatggctaggtcaggaagtatgttgctcaatttttctgcttgtatggcattgttgatttcttgaactttcttccctggattgcttttccccacataaatcatctctagtggtagttgcagagctcttgccagttaatatgcagtgcttgtgaatttagggatccactctatatcatccccttcatacgagcatatatatttgcctttgatatctaaaccaagtatatgcattagatcattgtacattcatcatggttcaaggagtattgatttctgtaagagttctaattgttgctttttatgtgatcttatcatagacttttcattgctcaactttgaatatgttatactagagtgctagttttgcataaacatattattcacaagaaagaaaataatgtaaagattactaacccattccaaaagcgatggatcaattgaatctgccaatagtccaagttcccatgtttcctcattccacagtgcttcctcccttgagctagagaaaggataagccaagcttccccaaatccacatcatgggtattgcattaagattcacaaccttccctagcggatccaactctacaagaataggcttcgttttgaacagccatacctctttaatgtacctgatggttgcgggctccaatagagaagggtcataaagtgagtaacatgacatcattggttgcagcttctcaaactttggtttcacgttagtccatgggattgctttgtccacaactggaatccaaacgagttcgtattgactctctaacctggttgaatcctgacgtgactcttagtacatttgttcaaaaatcacaagctcttgatcagggacattatgtaggtctgttatgtagagtagcacaattttcctcctcaacacctcaatgctaacatgaagacaaactacctagaaggttggaacaggacagctttccccttattgggtcatttgccaaaagttttgattcatgtttggattcaccttaaattatccaaaatcacaacatgtttgatcccaaaggagttaattctaagtaaaattgattgagttaaaacaaccattaagtaacttttgtgtttgataaacaaacttatcctgaattttattatagattttcttttagaataaaaaaatctaaacacaaatcccttcaaattcaattttaaagaaaattaattttattttgcaagtcattcatcaaaacaatcataaccataatattcgaatttattgggggttgaaaaaacaaagtcaaatagtcttcctgacaatatccatactcgagtttatttgtattacgtcacaagtaactctttaaatatagtataaaaatgttctgctcctgtatcttccaaaaggaataaagatctctgagagctatttcctggatccaagcgagagtgccctttctgacacggctgcgtcctcacgaatgccaaacttcgtaggcatctaaagccaatccattacaagtgaaatcttgcccaactccaactacaaagaaaggggtgaggtgctcattatgtataaatgggatctcttggcgccaaataattgaaatttaatttcttgatctttatcctcaatttttggaaacttaaaaagcccttctggtaagcccgctgaatagaaacattaaactaaaagcccatacaaaatgtgcacccaagaaaaaaagaccatatgcagataatggcttacctaaatgctgatgacaaatggtgagtgcattggaaggtgagtatttatgttatcaagcttatgggccaataaagttaaaaataatgataacaaaacagacatgttcaatcaagagtttgattaaagttcttttggtaaaaaaaaagagaaattaatcggagttactaagataaagttgtgatgattataatatgacattaacaatggaggcatacccttgacccaagccagttatgcctaaaacatgcggtgcacaggatacaatactccgaatggtccaatagacagcaccgggaataagattggaagcagtcaacatctctgggacctcagggtcaatgtactgacagtgaagctcaaggaattggacaacgttattggttacatcgaacattgccttgagaaggttgttgattgtttgaaactttggtcccaaatcatccacttgttgcagtgtttcatggatgtgcttcaactttgcaacagacttagcaagacgattggtggcataaagctgagccaccagccaaaatgccccgaagtttgctgcaaatgctgctaacgctatcaccactttggcatcccatgaatagcttgagagcatgcccagtattcccatgattgtggcatgtacatctccaccgctcgaacgcttgtaacatctattacacaagcatgagaacatgaataagttaaaccacacaatagataaaatagtactctctccggttctttttcttataaaaagaaccggaggtagtattgttgttgtaggcgtttaaatagttgtggctattatcaatatttatacagagggagatttagaattgtaagaaaagatttattgttaggaataagaaaacctcgcagaaaattttgttgattgcgtggtacgaaatatctagcacattagctaaatcagattggtatgcactgctcttcatggcatccatctgcccttgttttccctgtgtaaaatttcaaaaacaaccacactcagaaaccaagttaaccaagaaccaaaatgcaaagtgagggaggagagaaattattgtatgttccacgacaactgtatatggtttccattattctccacttaatacagctaagtttcattcactctttctaataaattgaaattttgactatgtactaaatcacgtaaagattaattgagatcatacaataatttctggagagagagagagggatgagagaggctgcacggtgaaaaatgtcttcaacaacttgaaaaagaggtctaacgtcaatgtgtccatcaacgggagcatgagtgtgtttggtcattgtagtgtcatctgatgctgaataaatatggcgcctaggccccgattgcatctcccgtggcaccattaccataacggaaattaaggatgcaagaaaggaagaagatcaaaatagataatgtttaggatcgatgaatttgggcttggttattgctagactgctagttagtgccagtggcttcttatatagctattgatgccaaattttggtgaatctttaccttacttgtatttggtttcaaatcacaaagtaagaaaggaaattggaatatcagataaaggatttgtcgaatttataccttcatcatcggttatggctttcttattttattatcttgtgtcagataaaaatgaaatcacactagtgctgtaaactttttaggttatttcattcgtaactttcatatattcattatattggcaacctgttagtctatcagtagttttttcacatgcacttttaacctaacacgtttcaaaaattaccaacacacaaaagtataataaattcacaaagacgaatcacaagctacgagttattgcaagaaaggtataaatctttcgtaacttctatgatgcgaaagaatcattgctatttattaaagtgtgaaaatagtttgcaaggatatacttgctgtcactttaggatgacattgacagttcgaaacttgcagggtttaactggaactaaagctctgttcaataacttaattattggcagcatgtaaaggatttgcgaaaataaactttgttcagttttataagataaagttttaggttgggtccacaacgtaagttgccaccatattaatatttgtgttattgaattcatgaaaatttcgttcacatagatcattttatccaagtctttatcacctcctaaaacaagattctccgcaacacattattgattttggtgttgggcaacattcaagctccttaagccaaaaatcctcgttaacattaataaatttatacattttcactattattatactatgtactgaatattcacacggatatgcttatttactgcatcatgttcatgcaattaaaacgtaagcaagggatacctttgatgagtacaacatatcgacccaaattcttaaaagcaacttatattgagctcaatgatttccacaaaaggtccggtgaattcagcatggataatgtcgaggttgtcgagattgacctccttccactgtcgataagtttgaaccattggcttccagggtcacatgtgttatctttgctcaagcatttacaagcattggtcacaatgatgttgttatcatctacatctagacataaaatagaaccgtcgcttaggttagatgaaaggtgcatgttcgaatctgatatcatttcccatttagagttaggatctgagcatgtcatgctaagtgttgcaggctttctttcatcctctgcatgtatgcagaaatccgtgttgtttaccaatagggtcttttgagatgtgtatgtccaggcatcagaagaagagcaagcacccaacgttagtgatgttagctgtgatttacttatgacacagagacctgtcaaagggtggaatatcagtttgtgtggattgccttctatgatgcctggtcctgcacaatgtcaaacaattaagtgacaaattagtaataatggtattttctaaccaactaatagtgcacagtttggaaaagaataattgcgcaaattttgtgaagtatgtgcaaaattggattattcaaaaatagctttaacagaaaagggcgagtacaaaagcaaaaggcacaagagaaaatgttaggaatgttataatacacttttttgaacatattcttttaaaaacattcttttttattagttaaatttattagaaattacaaaattttatgagtcttatatcttatttaatgaattttatctcttttttttttttaaggttaatgaatgtgtttcttgattttgtaattttcaataagttttaaccaataaaaaatatgttaaaagaagtgtataaaagagtgcattgcttatactacaaaaacatgaattaaggaagtacaaaaaagtcctaattagtggttatggtcgcagcgttacctcgaaatggaatttggagggcagagattctgtttaagaaactggtactcctaacctgattccaatcccaagtgagaaggccataaaactcttcctttcctataaccccttctcttaagtagtaactaccaacaagtgtccaataggcccaatccaagtcaagctcagctaccagtgccagaaaacagttaaggtatcggttgtcattcacattggtacctctcaagtccccaccaaactcactcacaaacaatggccatccatggtccactaagaagccagatgttttctttatattcgctgtcacttttccacatacttggtttgggttctcatcagcccaagctccaccatcagtgaagccatacctgtgcacctcaaatactagtttccctttgaatgtcaggctcactggtcgatcccgaaggaatgacaagtctgtgtcaaaatttaggccagatagaatgactagaacatctggatttgctgcatgagcagcttctgctcctttcaccatataccttcaattcagaataacaacttaattatcatctacacaggaattttctttcttcttgttttttttttttttttttttaaaaactattccgttgtgacatactcctgggaatatgatttggtgttgcaaatcatctacatagccataaatcttaccaaaactatgtaggaaattgattccgtgttgtaaaacaagccagcgaacaatgaaggaattgtaatgtttggaaattgttttctgatgacaaattttgtatgcttaaatatatttttcatatctataatataatttattttaattttactaccataatttcaattttattagatattttagtaattatgatcagtcaagacctattaggtaataatctgacatatttcattagtttatcacattatcattttaggtccatttcaagatgaggttgtagttgttagcagttacttacttgtaccaatcattaacattctgtctagatcctcggagctcattcctcaagcttatgcccacaactgctgtaactcccttgaaaagggtggtcatcttggtgaggcccaatatccactgatttgggtcaaaaaatttgtcaccgaagaagccattgccgtccgtgttaccgcagcaccatcctggctgggtcacgtggttgtccaaaatcaccatcacatcgttgtccccgagactcttcaccactgcctggacacatcacacaatattgcaccacactcaactcatggccatacaaatattcagaattattttgggtccaaagttaaggattaatttctaaaactatgattcatttcgaggattgatcccttttaacataatttttatattcaccacatagagattaaactctatactatatacttaaaacacattattatctcttaactatgtcacaccataatctctttagtttcattatagtttaattacattttaaatctctttagtttgaattatgtgagattttagttcctcacatgtgctttgaattaatttactaattaagtatctttagttttaaaatctttgaaaatttaatgattataaatattcttttactcaaaactcactcactaaaatatcaaattttgtccgaaataaaaaaatcaatttcttaattttctctttaaccttaatcattatccttttattttaaatttttcactaaatcatcaacctctcaaacatttgaataaaaaacaacaattaaaaaaattcaagtagaagaaaatcaatagaagaataaatttatttaattttaaaaacagaaatcaaattagctcaaaccaaattatacatatttcaaataaaacgatcaacaaatgtaattaagtcaaaaaaacatttttacagagcaaatattttgtattgttgaaaattcaataaaacaaaaaaaaattagcaatttaattatgcatgcatgacgtaataagaagctaacggaagaaaaaaaaaaataggttagcccactgttcacgtcaacaatgatgaatttaataaggatattgcgacatttacatggcaagctggcccatagcaaattagttgattgaagcactcaattatcaaaaaccacaataagtcaatcgctatcggataagcgtcaccgatcgataacatcaatgatcaagtgcaagatttaataactaaaaatacacgtacgatgaggtagttaaaattagtcaacgaattggtaaggttgatttatgaatgaactgagttgggtaagaaatagaagtaattaacttaaacttacctgaaaagcttggatgagagaaagatcgatgatggaggggttgttggtttggacaccagcaatggattcaaggaggccaaggctctgaaaagatcgtctaacggtgagagaagcaagagagtcattggtgaccaaaagtgtgggccaagtgagcctgacacagttgaagcccatggactttattccctttgaaatcacatccacgggctttttgctgagcccttctgccaccgcaacttccaaatgggatacccaattgacacaggctagtttcaccctttggccatcttggttgaggatccatcgggaatccgtgtgaagaagacccgtcacaggcactgtgtgatcatcggaggagagtaatgctattattagtattgatgcagagagaacagcgaaaaccaacgtgctcgaccaccacttacccatttccatttcatatgatatttgatattccacgcgagctaatgagaaccaatatgttgtttattgaagacataggaataggatgtctatatatacatgtggggaatttgtgtttctgtctactgttcttttgtcattgtctttcttaaagtattccctttccgagctatatatcttgttatgtaccttccaaatctttctcatatgagtaactcctttgtttcacatgattttttcacattcagaaatcacataccaaaatatattgtactaaaaaatgtttaaataaacttctgaagaaaaaaattaaaataattaaactttttatatatatataatttattttatacttaaattaatttgtaaaaattttattatttaatttctctaaaaactcattttaatttatacatataagttatctaggggtgtaaaaaaaattgattcaaacaaaacatgattataattgaattgaaactgaagcgatctttatccaaaattattttgatttttatttgaaaaaaatcagttcagtgcgaaataagtttgattcttataattagtttaaaatcaatttggttcataaacggtttttaaaaccaattctaattctgaaccgattttctaaattaatttgactatttaaatgtaaaattaaaccgattcaaacaatttgaaaccacttcagattagttttttttttaccaaatcgattttttcacacccctgaagttatctgagcttatggataaactttatttcgttttcatttataaatgttaatgaaagaaagtctaactcgctattaagaaagtaaatgtaccaagtagctcactagattgattcccctaaagtatatgcaaccatgacgaaaagaaaaagtgtagtagttattaagtgaatataattctttctctacatatacaattcatcttatacaaataaaggtgaataactcttctttattagctttggaaggttgtgcaaaatcaaggactaaaatctttttgtcaaggcggcgtataggtagtaaagaaacacgcatgtaagaagttttcaacttcgtactaattgatagttttaaaatgagtatttaaaatttattaagtaaaattaattaatatttttgacaacaatcttttaggaaggttgtcttgatttttttataatatttatttctatataattacattgaatttttttaatgagaatgtttttaagaatacttattgaataaaagtatttttaggagatattatttaatgataacctttttcaggagttattttcattgtcattgagtcacgtgttatctcaatcttatatattaacatttatttatttttaattatcctcttcaaatatatttcttaattttattttattgattacataattgaccatccctgctttgatcacaatcctgaaataatattctctatggcacaatgtactatgttgactttggtgtcgtttagcaatggtgccctggtcttgagccaaaaatcctagccaacgttagtaaattctgtacatattttaatagtgaaataatatgtattgaattcaatagtcatatatatggacatgtttaatgcatcacttccctgccattaaaacataagtacatggttagagaaatttacggtaatattcttaaaacaacttatgctgagcttaatggtttccataaaggtctgatgaatttagcatggatgatgttgaggttgtcaacattgatctccttccgctgtcaataagtttgaaccattggctactagggtcacatgtacgatctctgctcaagcatttgcaagcattggtcacaatgttgttgttatcgtctacatctaagcatacattagaaccatcgctgagtttagatgagaggtgcaacttcgaatctgagatcatttcccatctagagttaggatctgagcatattatcccaagttttgcaggcatcccttcattctctgcttgtatgcagaagtaagttccttttattgatagaattttctggggtgtgtatttccagccatcagataaatagcaaggacccaatgtcaatgggtctagtaatgactttcttatgacacacaaaccggtcaaaggatggaaaatcaatttgtatggattgcctcttgttatgcctggacctgcatgttgtcaacagagagaaatgtagttcaagtttccatgaagtgctaaattggcaatttattttttgttgaacaacatatacatcaatggtagcaaactcaatactttttttagtaacatgaacatttttatatgatatctctatcaatgtgtaatatggttaacagataattgatccttaagtatataattaagaattcgatctccagatatgtgcgtacacagaaacatattttgggaaagttaatattttttaaatagatctcaatatctttaagtgattagtcgttaactttggattaggattaaaaaaaatcatagctttatcaaagtttccctaaagtagtaaattggtagtgatatttttcaaccaactaatagtgtagagttaggaaaagaatatttgcacaaattatgtactacatacctcgaaatggaagttggagggcagagattctgtttaagaaattggtatctctaacttgggtccagtcccaactaagaatcccataaaactcttccattcctataactccttgtctaaagtagtagctaccaacaagtgtccacaaggcccaatccaagtcaagctcagctgccactgccaagaagcagttaaggtagcggttgtcattcacgttggtacctctcaagtctccaccaaactcactaataaacaatggccacccttggttcactaaaaagcctgaggttctcatcatatttcctgccacttgtccacatacttggtttggattcccattaacccaagcttgaccatcagtgaaggcataccagtgtgcctcatatactaatttccccttaaatgtgaggctcactggccgtttttgaatgaaagacaagtctttatcaaaattcaggccggataaaataacaagaacatccggatttgctgcatgaatcgcttctgctcctttcaccatgtaccttttgttcagaacaacatattagtcacatgaggattctctctcttttatttttctttctttctaattttaaataaaccatggttttatccctcatacagttacaagtaacttaaaattgtatttactctagcaccagccaccagctaattttgaaaaaagagagggagagaggatgttttttttactgcaagtaacttatattatttcattcagaataatgacatcaatacaacaaaatattgaacataaaatctagatgctctagcaaatattaggggtgacaaaatggattggtcttatcatgtctacttattttggctttttttaaggtcaagttggaattttaaactcattccatttttgtcagtcaaaaaacgagctgagagaaaatcaggtggatcaatccaccaacccttttttattaaaagatattatttattttgatattttgtacatatattattaatttttaattattttttaaaataaattattatttaaaattgaagataataaatttaattttttaataagtatttattatttaatatttataaaaaataaaattaattaaaatcaattaaaatatatttattattattttaatatttagttttggcggactaatccaaccaaaaatgagatggattgtcacttttaatctgtaatctatatataaaatgtgagacagaacatattaacccaattatttttgatgggactaaccaactcatattaccacatctagctaacacataagagagacaacatcattaacaatttaacatgtaaaaacactattttactttaattttgataattgcatactgttcgacccacaattacaatattaatatgattccttttagattatagaaatagagaaagtattatacaaactttgacttttcttaaaaaaaaaaagacactttgactgtgagcacttacttgtaccaatcgttgatattctgtttgggccctcggagctcattcctcaagctcatgcccaccacattagtgactccattgaagagggtggccatcttggtgaggcccaatatccactggtttgggtcaaaaaatttgtcaccgaagaatccattgccgtcggagttactgcagcaccaccctggctgggttatgtggttgtccaatatcaccatcacatcgttgtccccgagacttttcaccactgcctgtagtcatcacaaaatgttgcccacactcaactcaaacttgaacaaactcatactatacggaagttagttgagagtgtggttcggactcttaaaaaatatcacccttaaaaatacccaccaagaaactgtccaatataaacataataattttataaaaaaataagagaaaaatgaatttagttaataaaattattttataataaaataaagagtttaatgtctacaatataaaatattttttagtatcattcaatcacaattgtgtaaatataaattttaaaataattatcataaaagtcaatcaatttattataatgatgagagatataagattagttaagtagttaagaaggaagaaattggagaaaacgtgtgggtttgtatagacattaaactcataaatatgattatttaaaattaaaaaaattaaattactaattatttttaatgctcaatgttgattggaattagaaagtataaaacgagagtttgtttgtaaattaagacaaataacaaaaacatattctactcactatatgcaacataaatggcaattaataaggaagtaggttggagctgttttcaataaccaccaaaaggcaatcgccatcaaatatgcgccaacacatcatgatgataagattaatagcaaagaagataaggaagatgaggtgattcaaattagtcaacaaactggttaattaggcaaagaaaataattgaattgaatatgataacaaaaacaatttacctgaaaagcttggatgaggggaagatcgataatggaggggttgttggtttggacaccagcaatggattcaaggaggccaaggttctgaaaggagcttctaacggtgagagaagcaagagagtcattagtgaccaaaagtataggccaagtgagcctaacacagttgaagcccatggactttattccctttgaaatcacatccacgggctttttgctgagcccttcggccaccacagcttccaaatgggacacccaattcacacatgccagcttcaccctctgcccatcttcgttcacgatccatcgtgaatccgtgtgaagtggaagacccttaacttcaactatgggtccggagagcaatattattgttattagtgcagagacaaaattgaagaccaaagtgcatgaccaccttcccatttcgtgtttcttcagtagtatcatctgttgtttgcctatgccatcatattccgcacctgtgagattctctgcacgcccgaacaagcccaatatataacttgaggatgtgggattgtacatgtggcaacaaaattattttttaagtttaagcaacttgtttatttaatgtcattttgtcgtttatttttaaagtaatactttacaaaatatttatcatcttaaagttattttatatttattaaaaataataataaataaataaaaacaaataattttataaaattaatattttattaccattaattcatttttagattttataatttattattattcatatataaaagatacaagtaaaaaataataattaatattatattaaaattaaaattattttaagataattttttcttacctaacaattataatataacagagaagtatatctttatccgttcctttcattaaattattccttataacatatatggatcctacaatctatcatgatagattgcataagttctagttgataaataaaaaattgtgtcaatttttctctctttctgatgtacataattatatcatgttactcaataatataagagaattcaatttctatgtctcaccaggtgaacaaggtgactagtttaaggtgagggctacttgcatatttattaattttcatgataatgaattatatatatgtgtgtgtgtgactaagtttaatatctatatattattgtgagtcagtgtaaatagtgagatccagtgtttgaaagtttctgaattttatttcactcctaaaaaatacactggtgaagacaaaagggcattttaattttaattttaagttcaagcgaaaaaaagaactatatataagttaccacacatttcatcctacaagtcatgcaatgttaatttaaaaataagtaaaggtaaaaaaatatgtggtcatttgattattgagatatgatgtaacctgcacgactaatcagattttttaacgcatataaatacaaacaaattgattctcggatccttcaccaattatatgtgttgaactggtccatttgaaaatcctgactccgtaaatatgattttctcttattttcctttctttgacggttaatcagcctcgattagggttcataaaatgggtttgatttaggtctaaaaaagaaaattaaacaaattaaattaaaatatattagtttaatttttaattttttaataaattaaatccaaactatttatcaagaatgggttggtatgttttagtttattagattatattagatttgttatatatattatattatttttaaaattagagaaaaaatttatattacttgattccgatcctaattattcttttgaaccaaaatggcattgtattatgcatataaataaaaataaataaattaataaggaaatttgagtggttggttaaggaactcaattgatattttttcttttttatgaatacctctaacttcaaaaaacaactttcacttcacatcttcattaaacaaggcatgaaacacacaagtgaatttaatgtcagaccttcaactaaaattcttatggcattatgtgtgagtctttgttcatattagtgactccaacaattaatatgacactgcttttcctcccataaactttatgtttaacatcctactaacttttatagtaaaacaatgttgttgattgcttcttcttcttcttgtatactttcttttttcctctaagaagagatgataaagtgtacccgaatcataccccgtatccattaaactatttacaagcgaaacggacaatgatccacaatattgaaactctatactggcggatgtatatttacaaacatacgcaattaaaacattaactttaataatcaatatgttagatgattatctttataattttatttatttataactaaagtttagatgtatcaatattatatttatttatttttaatattatgtgtgtatgtattttaatgttatgtttgaattatttaagaatgaatttttattataattatagtaattattttaattatttttattgatttattattattaaccttgtagataaggaaattgtggatcacatatacatacataaatatataagtatccaatgaatagaaagatgaggattaaaattattacttacttaaatatgaagttagatatggatattatttttaaacagaaatatacgaacgaatattatactatcttatctggaaaccacacattatcatcccattctctaagtgttgttttgcattattagcatcgtaaatgcaggaaaaatgtatacccacacttcattttggggtcgattgagacaaggaaggataggaagataaaaaaaaaatgatagatataataagggatgtaataaaaaagttggaaaaaaaagagataaaaaatgtagttttatatccgaaatgcattatgtgattgcattgtaatagtaacgtagacgtaccgtgactccatctagttcgctagtttgaagtttaataaacacttgaacttaaacgtagtgctacgtaataattgggtaggtgatatatatcacgcaacctttggcaacagtctttctttctgcattttctacagaaaattatgacttattaatttgtatatatcgtgcgtgcactcaatagtttcgcttcgagataaaaagaaaataacggctaacaaagttcatacctgaattgcggggaacactgcaacacttgcaatgcaaggcagtggaataaactgcccattgcttcttattttggtatggctattggttactacaatctgtgctgtgctcgattttgttatacaattataccgtgtctttgtatgattgcgcatctctttcttcgtagcttttttttcttcttgttgttggtgtttgaaattttaaaaattaaaaataatttgatttagattttagaaatccacttttgtgtttcaaatttaaaaaaaaaaagttttttttatagtaatttacaagtttcgaatgtgtgtcagtctgtgacagatgacaataaacaagctcttttatttagtcgtgttttgttgtttatggtgattttgtcaaaggaacaccagtgactgtcaggctgccactgataaagaagtgaactgtgagaccaagacgtgtataatttacatacaagaagaaaacaaaaacaaatagtatacttaaaaaaacctaagaaattttttacaagcaacttacatcaaaacatgaaacctaattgggacgcacaaacttcaaatgtacaatgaggcaacgcgcattcacaactcttcctagctcctaccctggcatatatttatttttgttcaaaattgcgaaatgcagttttggttaggcaaaaatctaaaaacttatccaccaccatgagcctggctaaccctgctcctctctttgctaccctgcctatgatatatcacgttagtttttgacttatgataacaattaagcactcagtttatgacattgtttaaactttaaacgtaactaaccttttttctgcaatgcaaggttaactagtaaagctttattctggtagtgattgtgcttcggcaaatggggcaccattctaggttttctccacaaacacagcaagtctgccaaatgtgagaaaataacaacagtggaaagaaaagttaatataatgtcctaatcatatagtcttagattcatcaagatgaatcggtagaatataattcaacttggtacctggtgcccgcaaccaaatgccatatccttatcattagtaagacaaatcgggcaaacctgcggttaatcatgtcatatgtaaaccattgttgacttcttgtgacacagaaacatcatgaatcatgatgatcacgtcatatgtctcgagattatatgaaagtcacatcttaagttgaaaaaagaatggtctaaatagtaccttattatcatataagtttcttgaagatgattctgcgttaacattatcataatatgttggtgtgttctgttgaaaactgtttgaaggaagaggtattgtgctgctgctggaagccatctcataatgaggtggaggtagaggaaccctgtctggtgaatgtcctctccgtgcactactttcatcaatgaagacacgaagcaagttcagttaatatctagataaaatcttcattaatatgctataagtaccttgtttttctatataatattcatttattaccccaatatgccaaggtctatggttgccttatattgagaaggtatctccatcaaagctgatagtgcaaactctgtctcttctttgcttgagtctatactctctgacattatttccgtaaaattcacaaactacatgcagccaaaaataaaatgttcacatttcagcttaatatgaaggactatgaagaagtaaccgtggcaggtcaataggactaagtgaattacaccaaacctgaaaattgtcaaatgctcgagctgggatgttatcatcaaattccctcatcatatcccatgggccatctccaactcccaccaaaactattgaaagtggatactcactgcaatttaaagagtatgagaatgcagggtggcaatccagaaaaaagaaaactacaaaatttacctggcttttacaattgcatcaattgtcttctcttcctgtggacttagctggccatgttgtgtgtcaacacttctggtcacctgtcgcaatattttaagtatcaatgtttttagatcttatagataagaagaaaaggaatttctacagtaaaagattaatcattgttgaagcactgacaaaattaagggcattttaagttaatcttttgttcagatgtattcatgtatccaattaatcttagcaaaatattgtagtgaagaagacagacatatttcagaactcacacattatgctaatctaacaatctaacaattagcagttttcttctgcagctatcaatgccaagatgtttgtgttaaggtagatattattattatcactaacaaaagaaaccaaacaaaaaaatgctttcataaacctataccattttagtttttttttatttaaaatctatgatacttttagagttataatcatatagttagtgtgataacggccaatgaaacatttgatgactgatgcacgtttacactagtttaaaaaaatcttcttttcaattttgtgaaatatgtattaaaaatacctgtccatcagcaattattagcaggacatgatattggccgccactttgctcgactatagtcatggccatctcaataataggggcaaatgaagtgggtcctgtcacataaatgcaatgagtcatgctgagcctaagtcaaaaatgcaatgaaagattattggtgaaggcaacacctgctagacgcaggcgagggagaatatctctatatcttgacaaaacttcctcaaatccattgcagaacctctcgtctgaatagaaactgaagacatcttgatcatgtgttgatgctgtcagaggaaaaagacaagaaagaaacacaatcaagtttgcaattttgaaacataagcaatctgaaagcatgaatatttatatatggaattaccatctccaaatccaaaacaaggaatcaagttatcctcgtcaaaaacacttaaagtttttccaataatcgagattgcttgttcataaggattttgaccacttcctatatgatgtaaactttttcggttgaatgacctcttccctgatttcaaagtgatttatgcaaatttaattaataccacaactcactacaagaaatccaagcatcaagatatgactaagagataaaacctgtccactcattgctctttgtaaaatcaatgccaacaatgagattagaagattccaggccagcatgtgaaagagcagtggtaacctgtgcaaaattatttcattatttgacaaaataaggtgttcttctgtgagtaataaccgcaagaatgaaagttttggggagtgaaacaaccaataagtattttctcatgctggtcttgttgcactatgagaaaagaaaaaaagtaaaataaagcaatctactctaagcttcatccaaatattttctcataccaaccttgttgcattgcactcttggactagtttggacatatcagacgttgataacatgtttactgctactcatattattaaatgaattaagggatgctctgctgattcatgcatgcatgatcaggaagaacaataaaaatgagagacagttgtctcttttcgtagcagcttttcttaagccacttcatttcagctgaacttgtttaactatattctatggcttggatttaaagctcatgccaacttcaaagatctgctgaagtataaaggtctgcttaaaagaaactttacaagtatatataaaggttttactcggagttgtagtaaaaatatagcaattctaagcaagggtctcgcaatttttttttgcaaaatccagcatttctatacatttttttctcctggaacatggtccccaatattggggaaaacccaagtcccacatatcggctagagatagcggcaaaatagtatataagtgggggacaactctcatcctatgagctagcttttggggttaagttaggtccaaacccacattctaagatgatatcaaagtctatcctaaatctattaacgggccacccactgtattatccacgcaccaagcccaaaagtgttgggcgtgaggggatgtattggggaaatcccaagtcccacatatcggctagagataatgccaaaatagtatataagtgggggacaaccctcattttatgagctaacttttggggttgagttaggtccatacccactttctaagacacaaagccccaaacagatccatttgatggttcagctcggcacagattttaacactcttttctgtggggaaacatgtttgttgttagattgaatccttattaagacttaagaacctcaatatttcgattttcaacgtggaccatcatcataggcagaaatttgaaggctgatttcagaaagaacataactgattccctttctttctttcttctcctcccttttgtgttgactgatgaaatatcgatgccgttcaggtaggaagtagatagacatactagttcaaatcaattcattatgtccctaaccccatttcttaccaaacacaaaaagtcaatgatgtaaacagaacaaaccaaaaatgatgaaaaaatactcatatattcatacaaaaaaaacacaattatatctaacctaagcaaatgacaaaaacacaattatacgtaagcaaatcacaacaattacctcatccagtgaatggtaatcatcagctattcttgaatatctcctatctatcctcctttttggctgtgaatagtcgtggaatggagcttgtgcacggtggtgaagaggcgtattataaggattttgttgtgggtatgcatttggtgattgagggcatccatagctatcccgtgaatatgaagaaccagcagatccatatgatgaaacatgccttctttcagacccttttgaactcttacctcccatgatcgactcctttagaatcaacaaaagcaaaaacataacaaccaaagctgtccaagtctctagctgcaattgcaaacaatatgttaaactaaaagcatcgcatatatatgttcacggataatccaatctggaacactgaataagaaaacaaaaccttacaactttgactagcagtaaaatacaaattctgggaaactaaaagtaaatgacgcatacgaaaatttgttcaagaaatttcaaggccaaaaaaaaaaaaaaactggcaaatatgaaagagaagaaagagaaaaataaactgaggcgctgaactatggagcaatgatgactgaatcaaatgacacctttccacaaatgatgactgtatcaacctttcctcaaatgctacaatgaaacttaaaactcagaacattttttttttccatacctctagaagcattgtttccacacaagaattgcaaatgaattgtgagagaattaacaacagacgctggataataatcaatgtctcacgctaatcgcgtcaagtagaatagcttctccttgtttaactaaatagaaggaagaggacaacgaattaagaaagctcctgttggaaggaaactagctagcaaggtcaagtcaacaacaactgattaatcttttcttcctattcaaacaagcctaaagagtttatatatagtctatgattataaaaatatgggaaaagccttaaaatcatactccaggacaaattaattaacactttagttgagaagctttgtttacatcggcattcaataagtaaatgaatgttctttttacaagtaagcaattatatatatattgtcaatttggaatggtattagcaattgagacaagaaattgcctttgtatttatttatttatttattcattcattcattcaatagaaagtggaagtcacttgtgtttttcctcgatccttctccgtagagttggtgttaagaaatgtcaatatacattttgctacgttgacgagtcccactgttcaaaaggaccgaaacttccaagaaatacctcgtaaaccaaactaattaaatcaatcccactattaagggctttaatgcaacaacttaacttgagttattaactctattttaatggatctgttattgctacataggatttaagaatatttttattctaatttgaaaaaatttaagattttaatttaattttaacagatcttattttatctctctagatgtgactccacatgcatcataaaaggatgaaatctacttactagtataatctcttataatttcactaaagtctcttttgttaagtaattatgctaataaatgacttaacacataagcatctcattaatttatcacatcattactacatacatttacatttttttataaattatatttttaaatattgtattaattaatttgatgtcatccattattttaaatagataaaaatttcaaaatataatttacgaaaaaaatatacacatcaagggacgtgcacagtaagtcaatgagttataaatattattgtaacattataatttaatattgctaaagtaaaaacaggaactaaaaaaaatctctaaaggactaaaatcctattatacagtgatattcaagagagaaaaaactataatgattatgcgttccgtggcatgaaggagcagtctcaaatctcagcccacgctcgttttggcctcaacgagtctctctctgtctccgtgtcatcccttgcaaacgaaatttccttcctttttgtcccacctaccatcactccaatcccctgccctcacgcctaccattgccatcttcacttccccaatcctaaatcaggcccgtccaatcacatcgccgggccgtgaaacacacttccccacttgctcacctaggatggtaaatcgagtttgatctaacgggtcagtctatttggcccgcaagaaagtatggatcaggttaaaattttgaactcacatttaataaacgggtcagaccaaatgtgggtcaggaccggaccagcctaccaggtcgatcagcagtccatcaataaaaaaatataaaatataataggtcattaaatgaatggtttagaataagagtgactaagaagaagtgagtgattttgaatctgtaaccctaatacatttttatttgaaacctaatgatgagttatactacgtgtataaatatgcttagattgcctatatcatgttgaaacaaatttctaagaatatgttaagacttaggagctagttgaaaatcattgttagacatgtattctctgtttgcttttacttctattagatatgtattttatattaaaaatcattgttatatgattaagttaatacattattaatttttagtataaataattatttgaattttttataatttttttaatgttttttttaaatatattttttattttttaaatgaactgactcactgatcgactaactcactttattatcaatccgaaattcttcagaggctgactgactggtaggtccggtgtggcggtgtttcttcatcaatcatcggcaacctaagacaaaatcacatttcattagagttcccactttatactcccatgttgttggttcgctccaatttctagggtttatcacatattcgtatatatgctattacattaaatggacggcaccggcgacctagacgccgatgcggtgctcagcgacgtcgaggacgacggcggcgatccgattccgatcgccacgaagcctccctcgccggaagacgtctccgtcgagaaattccgggaggttctcgcggagctcgatcgggagcggcaagcgcgcgttgccgcggagaatacgaagtcagaactacaggtttcgttcaaccgattgaaggcgctggcacacgaggccataaagaagcgcgacgagttcggtcgccagcgagacgacgccgttcgggagaaggaggcgacggcgacgcaattagaagaaaccgcgaaggaacgcgacgcgctgcgatcggagattgggaattcgagccacatgatggtcaccggcatggagaagatctccgcgaaggtgagcagcttcgccggcaaagcgctgccgcggtcgcagaaatacaccggcatggcggcggtggcgtacggcgtaatcaagcgtgcgaacgagatcgtggaggagcttttgaagcagaacgaggcgaccacgaaggctaggaacgaggcgagggagcagatggaacagcggaattacgagattgccattgaggtttctcagcttgaggccacgatcggtggcttgagggatgaggttgcaaagaaggtttcgattgttgaggatttggagagggatttagctgttagggatcagaggctgaatgaggtttcggagaatttgagcaaggagcaaagtgagactttgcggttgaaggagtttgttggtgagtgtgaggagaagttgagtaagttggaatctcggatggaatcacaaaggcctttgttgattgatcagttgagttttgtttcaaaaattcataaccagatttgcaatgttgttaggataattgaccacggtagcaccgaagagctgtctgaatcgttgtttgtcccacaagaaacggatgttgaggagaatattcgtgcctctttgtctgggatggagtccatatatgagttgaccaagattgctgttcagaaagctaaggatgtgcttgaggagaaggatcgtgagattaagagtttacatgagacggtggctcggttagttagggagaaggatcaaattggttcttttcttaggagtgctttgtctaagaggattgcagttgatccgtcttctagaaagagtgagctgtttcaagctgcagagaatgggttgagagaggctgggatagatttcaaattcagtaagcttcttggagatgggaaagttgcagcttcaaatgacaagtctgatacaacggaaaaagaagaggatgaaatatactccctggttaagcattcgtttctctttctagtttttaatgaaacttgttcccatcgtactttgcattttgaagacccatcaatgaattctttgtgcatgcatgcaggctggtgctttggaggatgttgtaaaggcatctcagcttgagatcattgagctgaagcatactgtgggtgaattaaggtacttaacatcagaattaaatgcatagttgcttgcatatttgcaatttgcagttgtgttgacatcataactttttttctttgcatattgcttaactgcattaagggcagagttgagcttacttaagcagcatatagaagctcaggccaaggagcttgaccatagaatgcatcgggtagaggaacttgaagagaaggagagagtggcaaatgaaaatgtaagcttaaatttgtttgagtttaatttgatctagttccttaaccataaacagttttatctttaatatttgtatattgtagaacgtagaattttgttgtgtatcctaggctgtggataatttgtaaggcacatttgattgtttgtacttctctgtcacaaagtaacaacttggcctatttgtaatgtagattgagggactaatgatggacattgctgctgctgaagaagaaattaacagatggaaagtggcagcagagcaagaagctgctgcaggcagaggcgtcgaacaagaatttgtggcacaggtatgctattcattaccaacatttgttgacacgtttgctatatttggaggatgtgaccaaaaagaaattttcagttgtgcccaagtattcttagagtttaatgtttttaaattttgatttattatttttttcagtccaactttgattgtgcaatgttttggtgtgaaaaatcaattcttgcacttttcaatgaaaaacacatgtcccaatgtaaatttatgacagattaattggacacacatcctaattatgttcattgattcaaattaattttatcaagatcaattccactcaacattaaaacaaatgggctctaaatacattagctagtagctggttgctagtggtcatgaaccaactatctcaaaagctttagatattgggtggaagcctatgaatgattttatatatctaatgtgtcccctcatgaaagaaccctttgggcctatagtgtggatagtgtgcaggctcaccgataggaatctcagggagaagaactgaatgatcacatgaatagcagtagttgttagtttgttgtgactgagtctagttagtcatttggatggttagaatggctgcaaatgctacccgctgagttgttacgttcgtgtgtataaatatgcataagacaagcttatgcatgcttttcataatgaccaataagaatagttcatgaggccgtggctggagtgaaagtcctcttcctctagattctcctattcctccattcattgtcccttttcagcatgtaatgctctgatacccaagagctatcacttgtcctaccttgagctgaaatttatttagaagaatggggactacaacaatcgaactctagaccctgtttccgtaaacactttagtacaccatgtcatgagctaattatcccaagaatttaagtgatcagtttggtttgggaaaatgttttctgctttttacttttaattataagaatgttaccttattttcactttgttttctgatttctcaaaccaaacagcttctacgtttttagttgaaagctggttttattttatatctactactaatgacatcctttttccatgaattccgttactgcaatcccttggctctctaacattatcatctcactcttaaaaaaaaattgctgtaactaagcaagttgatatcatagaaagccacctgttggtggatttttttttcaatgctattgtattttttcatcgaattttcctagtgataattgctgtctgcaaatctgcagttgtcagcacttaagcaggaatttgaagaggcaaagcaatccatgttagaatcagagaagaaactaaatttcaaagaagaaacagctgctgctgccatggcagccagagatgcagcagaaaagtctcttaagttagcagacttgaggtcatctagactaagagacagagtagaggagcttactcatcagctcgaagagtttgaaaacagggaagattcaaggagcagtaatcgacctagatatgtgtgttggccatggcagtggctcggcatggactttgttggatttcagcagcgtcccgatacacaacaggaggcttctaacgaaatggaactttccgaacctctattataattgggccttattcttttctctctttttttgtgtatttatgttgatttcttcaaattaatgttacaaagttgtagtttataccatcaacatgttccaccatctcttggaatgccgtcatggtggtcactggttgagcattaggctactgtaaagtgagaaagtctctgaagtctgaagtatacaagtgagggtgtgttcacgcttgaattaaaataagttaagttcatcaaacactttaattttaattaacataaaatgcatcttcacttattcactttagaggttttctcaattcagatgagccgtttccctgcattatgatgttgcgcctgcttccggcttgagtagctagctattgtactttggttgttttgaacgaacatttcatgaaagcaataaacaaatacactgtcattacattacagtaagcgtaaccctggtttctgtatctgctcaatatagtgcatttttatgggtcggtgccctatttgtcaatcgagttacagcattgtcggcttctgtatggacgtttcttccattgaacaaattggtttttgggggatctatgtattcgtcaatgtctccctagcaagtctatattggaacaggtggaacaagtgggctggacaaccactcaacatgtcaaatctctagaaactatagcggtttcaacgtcgttggacgacattcaatcgtccctctttttgttttattatcaaatatattcaatacaattttactaataaaattaattatgattcttttttacctttattttgcttctgtaccgattagatcctgacattttattttgcataggaaggtgtagaacaaatatcctaaaagagactgcatattaagggggtgttcctcaaccgggttagatcttcacttagtcttgaactttcacgacattagatttgaagaagtatggaaatatacgggtttaactaaaattggacctaagtaggacaaaactaaattagtggtgtgactaagaaaaatcatgtcttgtaatctagtcgacatatgtttgtttaatggcaacatatgttgtttttattttgctttttaggtgtagacattgttgaaacaattttttttttatgagcaaatgttaacaattaatatgtcatgttaattggaacaatctttttaaactggtagtaatgttctaaacatatttgatgagccatctcaagtcctagcgcaacaccaaagatgttgttgctcatgtatgcatagattaacatgtttggaaacatgttgagaataaaagaatcgcatttgagacgtgaaagttataattattaatttttaaaaatcatatcctaaatgtgaaattaaaaacgctaaagcatgcagtgaaattacaacagtggcggagtcatgatggtggagcattaattaaacttggagcatatgttataatttttcgctgtgcaatttggtacgataaaatgtaacgtataagcatttcactttttaggacaaatcttggaccagctggtctgtgccttgtgggatataagataaaaaagcgcgatatttattggccattgaacatcgatcatacttggcgtgaaaacttaaaaagccacacacccttaagaaacttctactacttaatatagtatgaactaatgttaaagaagctgttactaatttataataaataatctctaataattctcgagaagaaaaaaaataagatacaaatttgtggtttaacaaaactacatgtggtggggagggaaaaaagaggctagccttcaaagatgttatttttcaggaggaataggcaaattaagaaagaccaaaaccccccaattttcaaggactaaaaaaagaataccaatgacatatagaatcatcatctgtggtgctaaattattgcttcagcgctttgttctgcatttctttttgagcaaaataccatcaggagggcgtgttagcatgacactgcaacggccataaagattatatgaataccttaagatgcttcccaatttggaccttgccctgaaaactcccctcacttcaaggataacgccattgccttccatttgtttcacaagcctctggctctctcttaatggcagctgaacttgactagagaccatgtggatatatgcaaaccttgattgaagccttgcagcatagaaaggctcaacatattgagtggcaataagggtacttccatagtagagataaattatcactgagctgaagtccacatgcaccttcttgtttggatttgtgaagttagccagcatggttagatcagcattgagtagatatccaaggtcaaggtatgcagcatttaaggtcacactagacacatcaaaatgaggactttgggggcgaaatacgaagtacactataaggactattaagcctcctatgattatgatgagccaaaatatcacacacaagcaagcacctaaccatgtcaagggttgagacttttgctccttgggcaactttataccactgaggcggggatcgtggcgtggctggtgccaatgctcggggcgacggttcagcggtggctggacatcagccgagggaggtggttcttgaaaatttacctttgacttaactggcaagaaaccttgattctgtctacgtggacttctttgcttgccacggcgaggctcttggagaataggtggtggtgggtgtggatgatcttctaccccaggttgcaatggaacatggtcttcatgctgaggtcgtgttcgtaatggaacacgatcttcatgctcaggtggcaatgcaactggtataggtggagctacttgtgtggatggttggtctcggcgttttcggcgtggcacaagtggataaggttctgtatcacgattatctatatattcaggttgtgatgatctagaaaaatgagggttggtttctcgacgagacatggtgtggttgtgcaaaaatgtatgaggaaaatgaagagaaacagaaaggcagtgatacgagaatattattaagctaatggaaacgagcacaaatcaagcctaaaacaaaaattaaagcacattaagggaatgagaatgacttcatgggaacttcaaggatgattcatataaaggcaaagaatcaaacataagccacttatgtggggcaaaatgtttcaattctttattttagatatttaacacccgatttgagtttttcaaacagaaagtgatatcatgtatcacttatggatgctatgattagctcaagccttggagtggatgtgtgaaatttagacttgagttgccgagcttattattgtcctatgatatagagaatttgaatccacattagagaacaagaccttgtgtgaatttacaggcggcatggattcttggactatgaaaattgtaaaggttagggaaaagacctgatcatgcaaggggaaaacatacattctaactaaagtctaaagcgctttcagtttcttgtaccacaatttacattcacacaaacaagactgcggaagatacctttcccctactttggtccaaaatacgtggaccacaaacacagactgcgaattctagcacactttaaaaagttaagaacagccgattgaagagaggaactcgttatgacttaggagtcaacattcgatcaatttaaaaagaaatcaatattttcagcttaaataaataaagcaatgtgttaaatataagagcagccttaacatactcatttcataaaaaagagacaagtatatgaaaccatttcaaaattggcaaaaattaaaggtatatatgcccataatataacactcatttatcggtggcagcttaaattacattgatgaacttcaggcggttgagcatttttttaacttttccagcaactgaaggaagctataattttcaacagatcagtcaaacagcagccccacggcactctctctcaaaaaaaaaaaaagaaccaaagttcaaagggaaaataatgcaatagctacaaaacaactacacaaaagtttctgattcatgtggctaacatcaattccccaggctcatgtcacggtagtaaatgcctcaattcaatagttggaagaaattttctcttcaattttggaatggagatggatgttattcttagaattctaagtcaaatagaaaaattaaagccagggtcttttgttgccttcaaattttctatattttccaagatctggtcagatgtattgttaacagtccccagatgcagacaggccacggtttagcaattgcttttctccattttgtttcttttcaacacttccatttactccacctcaccccaaaacagatgtaagtaatgtgatcagccaaacccataaactactaagatttcatgatcaaatgtcaataattagcattctaactcctccattcttacatcggataacctagttcaaaagagaaaaaggctacccaagacagtaaaaaacttatgcaagtagaagttttcaattgaacaggatattaataatttaataggttgttagtgtttacgccactagcacagaatgtaaatattaatcacaagttcaacttgtggaataagcctcttgcaaatgcaagataaggctgccaatggttattcctggtctaatgatgttcaaaaccggagggaaaaatccatttcttcttctaaaatcctatattcaggcaagttgaaatccagtttcattttgatgacctgggattatattagaagtggattctcaataaaactaggttaagagtttctaaaattggtgtaatatgtgtgaataaagaacttgagataccacatgttagagaaagatttgttattgaaatgaaaatctttgagaaacacaattgaagagagtgagtgagtgaatgaagaaaggatttgtcaacccagtttcaatactgtactttccaaactaattctaaaatgtagcagttttgaaactagtttcctaatacacgtctcatttgctgacatttagccaccaccatggcattttcttaactatttccatttttaatttcatactccggaagttgcttggatggtggaccctagatgattcatttctatttgtaaatcatcaagaatccaggcgtatgtccttcatctgtacattctctttgccctcctttgttctttctatttcttctccaattttccatcaaaccaatctgcaaattgctagttgtgctggttgtagttgtccttcagctagtcctgttccaaggtgcaacattatcttgggtagaatctattggcaaggaaataccagcatacaatgaaccagggtacattaatatcattatataaaaaaaagactaaggaacttattttatttcatagacatggggattgataccatgcaaaacaatacatataatcaaagttgcgtgaaaccatgttctgactccttaggttcagcacaactgcagagaatacacatcactgtggcactatcaaactaaatgtaacaactacggaaagtgttgttttaatataagattctcctgcataaatgcactataaactatcccaccaacaaaagtgaaaatttattaagtaacataagataaggcagtttccagtcagtctccattgattcagcagccttcagaaacactatgcaacatttaaatgattcatgcatccattttttttcttacattatattgtttgttttctttcatataggggttagcaaaagtggacaaaatcatattatatgtcatagttctctaataaaagaacgcgctgaaatttaaggagtagaaacatacttcggataaatcaatgtgtaatgatcatggtgacatttctttggaaaagcttgaggttccaagctgcagatacaggcagaagcatcataatttaccagaaaataatgttaataaaggtcaggcaagttgaattttgtaacagtataatcctacaaatatgtattcttgcatgctaatccaaatctcagaaggaaaacataacttgtgccagcatcacagtttttcagaaactaataaatctgaatcttgaaacctaacaaggctacctagtgaatctttttttcacatccacaactctccactgagttacatgtctagatatagacacaaatagtaaaccgatgatctgttaataaaggttccagagtttattgttcaacaatttgctaggatatagcaaggcactaggcataagccacaccaaggtgagatcaccaatgaaaccatatcttcatagttcaaactatgctctgcaaccacaaacttcatcttgatgaaacaagacaacattctaccaacatcaaggagttgttaacccaagaagggtgctatactattattgatagttagaaccataaaatattcattgattttctgctatgcaaggcaggacatgaatccatctgaattgagctgccactggtcaaagatttactcaaatagtatgaagacagcataagactaactcaaagccaccctcaatatgaactcttaagaaacaacaattgggatttgaataggcagctggagtgattccaaccaaatcatcaattactgaaattagttgtgctgggtgagaaacaaatccatagctctcaatgtataacaatcgccaaaagtaaatgaatgttctattgtattgacatatacaatctgccaagtgcatagtctgttcactctgttgacattatgaaacaaaacttggataccgttacttcattggtagcaagaaaccattagagcacagtcctctgtatggatcctttacaagaagctggcctgtgaattagtatgttatacagcacataagtatataggagcatagagacacataaaggtatgggatggcaccacgagcgtcataaaaataggataaaccaatttacaggcgccattacctgcagataacgtttcaggtcaggtcaggtttgctaagccttggtgtattgtatccagaaaaaactttttaagtcaggtttcccatttgaaagaaaggtgtgatgaatttgagtggatcaaaacacaaactagtgtcatgttgtgccatcacttgattgaatggcattgactagagtctcagagagatgtctgtcaagtgtaaagcctctctccatcatctgatcccagaccctacaggccagtgaaatcttttttccccttataagccctccaactatcaacttgtaagttacctcatcagggtacaaacctttgctctgcagttcatcaaataggcgcatggcatccataactctagaagccttacaaaacccatttacaagtgcattgtaagagatgacatccggatttaccccattctcaaccatgtcatgaaaaacactatgagccacatcaaccttcccattcttgcacagatgatcaactactgccgtatagaatatgcgatcgggaagaacatgcatccttgtcatttcatcaagcagcttcttaaccacatgggtacttccttccctaagaaacgcatctataagtacattaaacgtcaccatgtctggcctaatccccttcccatacatctcctcgaacaactcataacccctcctagtccggcgagccttacagaaccccgtgatcacagtattatacgaaacaacatcacacatccctttggtctgcatcctctccaccatcatcaaataagccctatccaccatatttgccttgcaaaaacccttcaacagctcattatagctatacaaatccggctccaccccactactctccatggtctccaccaacctcacggcctcatccaccatcccctcatcacaacagtaattcaacagtatgttataagtaaccaaatccggcacacacccattccggctcataaacgccttgatcttcatggccttgtcaaccctccccatcctacaaaacccatcaatcaaagcattgtaaactaagctattaaccttcaccccacccttgatcacaccaacagcgagctcataagccaaatcaacgcgcgccccaccgcacaacccgacaacaagagcaacacaggctttataatcagggctcaaccctctgtcaattaaacgacgccaaaccctagcagcctcgtcaaagcgtttagctttgcatagcgcgtcgataataatcgtgtaggaaacgacgtcggggtctcttcccttggaggacatggagtggaagagttcgagggcggtttctaagcgattttggcggcataagaggttgaggtaagtgttgaaggcccaaatgtcggggacgaagccgagagcgtccatgtcgaggaggaggctgtggatgagggggaggttaatgttgtcgggggcggagcagagggcggagatgaaacgggagtaggtgaagggcaggagggagaagccgcgggggatgacgtggcggcggtagtagtggtgggcgaggtggaggcgggagtggcggaggaggacgccaatgaagcggttgtagtcgacgctgaagacgcggcaatttgattcggtcatttggtcgaacaggtggatggcttggttgatgagaccggctttgaccaggttcgatatctgagagcggtatgcgaggcggtgtgcgccaatgctgctctgatacatatcaatcaaaatccaaaggcatagcaccagcaatcgcccaaatccttattcattcaccttcacctccaatgctgcctttaataatattatgcaatgcattccttcattcattgcacgttgagagttatgaacgcagtaactaaagttataaagaggcacaccacacctactgcatggtgcgtgcgcgcgtgagtggtgacaatggtggttgtttgttttccctattctcttctcgctccgactgcaaccggagggaaccggaggggatgggagggaagagaattttttattttctttttagttttgtcttcattttaatgctattttgtctctaggatttttttcaattttgtttatctctcttaggaggactcgttttgctaaatgttgtattttgtattaattatttttttaaaaaataaccttaattacttaaatgatatgaattaaaaagataaatatattttctttttttaaaatgggagaaaaagactaatacatattaatcaattgggtaaaaaataattaaatataaagaaagagaaaattcaacaattttaagaataattttaaaacatactatataaattactaataaatttaatattattaactaaattaatttatttttaaaaaataatcttatattgagatattagtatttaagtagttaactactaagaatgtttttaggcaatatccctcaaccctcataagatgaatgattgtttccagagtgccaaaacacattgggcacacctcagtatctcccatatatgccttcgagatctctggacatacattagttaaaaagcaagttccttgacactatccaaatatgcattttgatcctttctggcacctgtagtcaccagatcgtttcaaaaaatattggttagcatcattgtttaattttaagttcttataacaagcttttatataataaaaacttgttggaaataaatcttaattaaattattttcccgaatgaaccctagatggctaaaaatcataacgaaaactagtcgtaatacaaaaccgaaacaagctttcgttgtatattcaagacgtaatacacagtggaaatcaatttttggttgcagttaatttgttcttttatgcgtgcaatgttctttatttaattatgggttaaatatgatattggtcctccaaaaataatagattgtaacaattgaaagatataaacaagaaagcaatgttcctccaattgttgaaaatttgagaaatatcctaacattgtaaagaaaaaaaattcaaaattgaatgagtgatatgtaagaatggtaaagaaaattaaaagtgggataaaaaccactttcatggcatatagaaggaaaacatgtaccataatgtcaattgaaatttaagaaagtataaatgtgatgtgttgcaatgtgcacgataaaagaacaagggcataagaaaagaacgacaatggataccaaaaaaaactatacgaacatgttgtaatgcttacaattaataaacatgttacttcatgatttattgcattttttgtagcaaaacgtgttttttgtcgcgacaagatgattcctggaggagacgaagaaccacaacactctaaaattaatggagtgcagggtgaactcaccaacttggagatgaactcatgattttgagcaattctacgtgagtttatttgagttcataaaaaacgtttccacaatcaatttaactccatttgcatatgtcaatttggatgaaatttacgagttaatactcgactttgacaacaatggatgaaccaatggtgatgttgggtcattttcaaaacttgttggtgtttttaggctagaaggtggtatgtatgccctagaagaaaaaaccgttgctctttttgaagaacttttcgttatttcaaatgtccttttcaattcatcttttaataattgtcaagcatgcttaaatttaaatttcttacggtcatttaaagaataaataacatataacagtgacattatcctctaatcttatgtttttctttctgcctacaacaataaacagttgtaatttgagaacaacaatatagcaagaattaaaattaacttatagagaaccaataaaatgtaacttcagaagaataactacaccaaataatattggcttgaaaagaattgtgagttgaatgtaatttgaagcacaaattatacactcaccagaactcacaaattcaatcgcaactgtaattttgttacaaaaaatattcatattatttttagctaggagtttcaacagtaacttttcctaaattatgttaaattgtgcacaatgataattttgctaaaacgtttatttcatgtttagcttctttacgttttcccatcaaattttcacattcatgttcatttcataacatcaaagtagtttattgtgggagagccaattaagtttcatacgatggaaaaaaaaaattgtagtcatggaaagtttgtatttcttgggataagtgttggactacaataggcctgtacgcaccagatttttttttttttttaaaaaaagacatcccttttagttgcaggtccgatctatctcctattccctgtcgacatcgttgcgctacttctcatcggctttgtcacactcttcatttccggcatcgtcgtagtttggttctacaatggcttctatatcctcgacaacaacttgcaaagtctggattaacctccattgtcctcctccaaccattatacatgtgtgggtttttttttccccagatctagttgttgttgatgtatgttttctcatatatgttcatgtgagtgtttgatttgtagatcaattatgggttgaactgttaaggaagcaactctgacagagagagattggtggtgcgaattcggatagccactatcaaagcgtcagtttcacgacggtataaatggcagcgaagtatgtctatgatgacaaaagtctttgtcagtgagatgtgtgcagtggcatcactagcagtggtggttgcttgaggggaggaaaaggaaaggaacgacgggagagaggttgttaagggaagaactttgtcaccgtcattgcaaaagtcattgtcagtggtggttgggtgagtcatcgggagcaggaaaaggttgtccaatcttaaggccttgtcatcagcgacaaagggagaagagtgaatgtggcgacgacgatggaggaggaatgcaacgatggcaatgaggagaagaaacagagacaataagaggaagactagaagatgggatgttttttctttaaaataaagaaaaagataatctagtataggcaaatctatggtggaactacacttatctcagataaaaatcctatcctacggaccacttatgtctcccgtcgtgggagacttaaaaaggtttaagtcccatatgttagcttgcttctcataatgttcccttattctttttccatattcactttaagctctttttcaaaatgttatctcttactttctttttcactcaaaatggtttttcactcaaaatggtattaggcaaaattgcttctctccattatgcttttacttcaatacatttgttttttaaaaaggcttttgagtttaaccatttctcttggtcacatctatgatcaagataggttcaacttgttttcaattcagtatctttatccgttttttaagaaattcgaatttctaatgtaaattaggtttaataatattggtgtgttcaagtctcttaaacatctctttacaagtttaagtttctctagcattgatcaccatcaagtatcatgttgtaaaaagtgagtttaattttttatttttgttgttgtgattttacaagtgtagatcaagtttgatttgtcatcaatgtatttgagtctccaacattagagttttttttagaataaatcatcaccaagttcatcattgcaatgaaagtgagtttaattttgtgatttttttttttgtgactttaccatgaatgaatgtgattttgtgattttttttattttttaattatgagtttaccgtattttagttttattttagacaatgagttgattgattttttaattattttttctcactctttttttattaaaatatcatgaaggaataatttttttatataaacaacatatttataaaaaattcactttatttgctctgaccataaaatttcagttaaaaaatgttgtataactataagaaacccccggtcaaacaaaaaaaaacttaagaaatcacataagaaatccgttgaccaaatttgagtacaaaaaaatatactcccattatatattgaaatattacaaaattttgactaaaaaaatatgaactcttttaatgatgttttaatgttgttagtataaaaagaatttttcagatgataataaaatcaattcaaatccatattctagaacaaacaattatttgtctggtcaaacatttttcattgtaacatttaataataaagaactattataacagtttgactactagagatggaaaaaaatcaagaatattaaaaccgtttaaaaacacaggtaatgatcaaatatatataaataaaaatatggagcgatataattatatttatgttctgatcacttttataatttgatataaaaatatttttattcattaaattattgaattgtatttatatattattaagatcatgtatcaaattctattaaaattgaataataataaaaataattaaataattaatattttaatatattttaaaatttatattactatttgtcgttaatctatataaatgaggtattcaattattttagattcatgtgacattttgcaaacataatatgtatataaaaattaatctaattaaatggtaaattttaaaatatattatttaattataaaataatataataattataaaaaattatgctgttataatttgattcatctacgataaaaatataacgaaaattaaattgggtagaatttccttcactagttttttaatgcacattacaattgcaccttatataaatattattaaaactgatgatataattaataggggaggaagaaagtcaattaaaaataaattaaaatatgtgacaataaatgcagttttaaagaggcacagtatttattattatatttaagaaaaaagttccaaaactgaggtggcactttgacgcattatgtctaggtcaaactgaatgaccatgaccactcagccccacttttatttccatttctcggcaaactccaaactcttcttcacttccctctgcctcttctgttttacacacataccccaccgctttctctcttctctcttcaagatccaaactttaagtgcctttgtgtgaattctcctctctttataacaagaacgagtcagaagtgggtcaccgtcaatggttttaggtgagaaaaaactcgaacctagccgcaacacaacacctaccaataccataccgtaaccattttttttttaccgttccaagcttttgctttcaacccattattacttctgttaatgggtttgaaacccaattaaaaagttcgaatcttgtcgattatccatgttaggagaagagagtaacaacaacgaccgcggcggcggtcaccgtagaacaacacattccctatcaatttcctggaccgaccggtctccggttacccggaaaccgccgcgtccgcttaagcctctcgccatcaacaaacgcagctttttggagtggccgagcgccggctgcgacgatctcggcgattggtctcttccaccgaccccaagaggttccaccataacgccagattcgggttcgggtaaagtatttcaattcaagaaagactaccatgcgttctacgacaaggaatgttcgagaatcgcggagcacgtgtacctggggagtgacacggtggcgaagagccacgagcttctgcggcggcacgggatcacgcacgtgctgaattgcgtcgggttcgtgtgccccgagtatttcaaaaccgacttcgtctacaaaacgctctggctgagggactcaccctcggaggatatcaccagcattctctacgacgtattcgattactttgaggatgtccgccaacagggcgggcgcatgttcgtccactgctgccagggcgtctcgcggtcgacttctctggtaatcgcgtatctcatgtggagggaaggccagagcttcgaggacgcgttccactacgtcaagaacgcgcgtggcgtcacgaaccccaacatgggcttcgcgtgccagctgttgcagtgtcagaagcgggtgcacgctatgccttctagtcccagttctgttctcaggatgtataggatggctcctcattctccttacgaccctcttcatcttgtccctaagttggttgatcatccttccccacgcgcgcttgattcgcgtggcgcgtttgttgtgcacgtgccctctgctatatacgtgtggattgggaaggattgtggctccgcaatgtgttgcaatgctagatcagcggcttctcaggttgttcggtatgagagagcaacgggggagattgttagtgtggttgaggatgaagagccgaaggagttttggattgctctttctaccaaggaagtggtggtggagaatggagaggtggagagaatggagattgatgtggggattcgtcccaggagagttgaggagtatgatttggattatgggatttttcataaggcgcttgctggtggggttgttccacctttttctttgtctaatgctggatcagaaaattgccttcccgctagagaaaatgggtgggggagattgacaaggaagcttgctagtggtatcatgaaaggcttgttcacatcctctaagtgctgtgaatctagtgtgaacatcattgaagaggggaatcaacataagaatgttgatccttttccaccttcttcgaacaatgtgggtggctcgcggggttcctttgagtgttttgtagataatggctcggagagggtaaaggataatgttcaagtcagggatcagtttgttgtccctagtgttgttggttcatcaatgccgccaccatcgcctcatcatcgagcatcggattcttttgcttgttttctgaggagcagccccaaattcagttccaagtcgccaacactgtctcccaccagttcggattatgcaagttcctttacattttctccttcatcgactgaacccgttcatgtgaaagacgcatcttcctcagagagtcgctccttagttaagaaagaaggtgaggcatttctggctaatcacaccttggtaggagcaaagtccagtttgccgcgcaaaggaacttccctctccattgcagagcgcagagggaataacccgccacctcgcatgttgctaccctcggccaccgaatcatcccgtgccagcaaggtccgggtaagatccaggtcattctcattgcctgccttggatgatactctgatggaggatgttagttgcaagcaaatctaactatgaaaacagtgggaaaacggctaatatgagatgttgatattattagtatagctgttgagagtaacgttaatggcagaggatcattgtaatatggtactgtgtcattttaaggtaggttgttatgcttgaagtagaagacttctaagagaaagttaactttattacagtggttcagtttcttcctgtatagataatatagccatagttggctcaagtgatctatttttggacgtgaactttcactcctgtttgaatattggtgcatgcctgcaaggtgtagtgtaggctgagcaataaaaaccacacaaaacatgcaggcaatgcactgatagcatctcaagtacataacaattatcaaatttaagtgaatataaagtctatttttctctttggctgttcttgttcttgtttgttccagctactagtcagtatgaatgatataatattaaatgctacatttttaataaaaaaaattcatttataatttcaaaatcattatcctttgaaaagggcaatggttagcaaaattgatataaaattagtgcaaaagatcacctttgtagggaatcatgtagcagattaccttgttttagatgtaatcatcttcctttattagttactgtttccactaaaaaattaaaaccaagtttcagaaacaacatttcatttacttgatggtgccaactgccaaatggtttattctaatttcgtggtttatatgaatggcatcaattactactgtacgtccaaactccaataggattctctaacttgcaggatataatcttaacagtaaatgtatgtgaaccagtcatctcagtcaaagtgaagcatttaatctatgaacacgattattctttacttatttaggatacactgggagactttgtatagcagtggattcgatttcctacttaattttatcgggcatgcacctatagatattccaaagatgtattataatactccaaatttctttccaaatatatactgatatcagaatctgataatgagatgaagcatgcacggtaaagggtcatgtggataatttgtcctaacgttgaaacatatgtaatctgtgcaaaaggaacaaacagagcagatatagcctttgaaagtggcatcatgggaccatttccttcaaagagaatcacacgacgcgacgtatttgtatttctagtgtgaacctttgttagagacatgcgaccttttacttaagatgtagtggaatgcaacttccttcagcagtttgatttcccaccagttgtttatcaatgccaccgttggttgcttctgttgcatcaatcatcaaaagtgaaaacgactattttgctgaatcttagtttccaaccatgtgcacatttggccgtttccaagtactttgttttttttttgctttttgtataaatttggcccctttaatttaaactctgtgcttttttaatccctagaaatatgtagttagttagagaagagtggcctttttacagctgcttccactgcaagtcaggttttccctaccgtgcttattcgtttagtttgaagatgccaagctaaaaaaatcagtgcaaatattaataattaccaaccaaatgtagagcattttacactcgactgtgaggttcgtagccgttattatatgggaatgctgccaacctaccgttgagtctttattttggtcaataggaatcataacagtatcacaacacactcatataccctgttaaaccagttagactccgttggtacctacggttgaatcttattttagttactgtatcactagtttttaaataattaagttataatttgtattcttaaatattttgcaggtgccaaaggttcttccatacaaatcaaagaacagtggctgaacgagtcaagattccattcttcatctacttggactacctcttctattttaatactggctataaattgaagatcaggacaggaccgtacaaacaagatgctaattaaggtgaatgttactgtatcacaattggtagggagtgatttgctccatccacctaccttcttttcgtttttagtacaactaaagcacaaaagtttataaacataaaatatttaacaaactccttatgctccatgatacatcactaaacttcccttggcaacttaacctttctactttttcttcagtgggagagaaaggatgacattgcttagatcactccacaactcaaatgccttctttgatcatagtccgggaaatgctttacgtgttaagtagactttgcctgcatacagaccacatcaaccacgtcagattaagattctagcccttataggaagacgtaaatgaaaatcatcttttgcaaaaggaggagaggtggaaataacaacaacaataaatacatagtttccattattaagtaataactcaaatgatatcatgatatccaaatagtgctaaattttagttgggtaaaggaaacaaatacagaatgctttaccaacaaaattgtagaaatgtagcatcttgcctcaagaaagttggattgaaattatttcaagtgcaaaaaacctcctagatagttttagaaaatcaggtaataaattcaaaaaacattcccaaattccgtttttttattttttataatggtttgggatccatatatgaatgacagcaaagagttttgatgagaaagggaaaccattcataaaatatccataacctggacggtgatcctaactcattttgtgttgacaatgtcaacactcttttcactgaaattttagtcccaaatctttcatataattcaaatctgtattggatggagctgagtattgcgtacatgcaaaagcttctccgagtaaactcttctctttgcaagcatgactgttaggatgacaggaaccattgcagcagacaaatgcttaagtgtgtgaccactgacaatgtgaaaagtcagtatataaatcactctatcggcagcctcttgcagcatagctagaagataaaatcctgtcaagatttaaaattgaaattcagggtaattgaaaatactatctacattacatagaaaaagctattataataccaaaagtacaaacctgaagcccagagccaatatgttgaatgcgtgtacataggaggcaataaagtagccatgagaggtatggcaatgcatgatgcactttgggccagaacatataaacggatgtcaccaaagaaccttcattataaatgaataagtgagaaaagtagcaactattctcaagagcaaaagttcagtaaactggatgctcagttaccgaagggttaagaactagcctaattttgacattatcttaatcaatccaagatgtttccactcacaataaatcctatatctttatgataactgcatttatagaattgacaattttttagaatagttagatgcagtttggtgatgcttttactgttattttcacattaaaattggagtatcaactacagaactcacacaacaaatgttgacgtgatgaaactccaactttgattaaagaacagccctaaaagcatctaaagaactggaactaagttttgtccaactttttatccgtatgaagagcaattttgttcacttatagaaggactgcatgtatgtatcaatgaaaaaatatccaactaatgcaatagggtaaggggaaaaaaaaactcatgcaaatagaaggaatgaagaagtaggcttgcctccaatacacattgctcattatgcctgccataattagaggtacaattgaaattgttcccttctttgtatcaatcctttcaatgatgaggattgccaacagagacgcgaaagcagcagacatctccaataacaaacaataatcaaggaatcaaaactatgaaatggaagaatatagatttctacagcaacaatggctgaattgaattcaacttctataggagaaactcaccggcaacctgtcccacacaaggcctgcatcatctgggccaagatgatagtatgaagacccaaaagcaactgaagtcacagcaacatagaagcatgtccaaccccatagttcaccttgcaaactgatgctacatatcttaattatataattgacaacaacaatcacgtaagctaaagaaaccgatggtgacaaaatgaaaatacctgatattaaaatagttcctacggtggcaaagcacaaggccaatgagaccaataaccatgaatgggaaatttgatatcacgttaggtgcattgggaatgcctgaagaacaataaaaaagaggaaacaaataataattttaatattctattatcgcaaagatttttacattgtgaacttacaatgatgtcataaaagattttcacgtgaaagatttttgaaactggcaactaatcacaaatacaaacaacattatattatatgaaaagtttgtccgtttttacattaagtatattaatttcatactcatgctaaccataatttctaattagttgatggattaaatttaaatagaaattgaactcttttaaatttaacaatattacattatacgaaagtttattattagaaatccttataagtttgttcactcagtgtaatgtattctatttaaattcggaaaaagaaatccttctgtttgtttttacttttcaaaatttgccaacaaactgaatggaaatggaagaccctcatctgctcagttgacataaactcctctacataaccaagtttacatttttaaggttactttactggaaatgaaaggctaacaagtagtttttcgtaaggaattaccaaagaattcgcgcttgtcagcgaaatcatggtatctctgaggctgaggaatggacggggttaagaggatgagtaaaaggaagaaagaaatggcgagtcccaatgcctgctcagtgcagtttctcatttttgttgcagaatagatggaaatgcgaggaaagagaacgaattatagagtgagacaggtgagtgaaagacatcaagtacgaggaggaaggtgctggcggtggcggtgggcggtgtggaggtggtgaatggcgccatcggcaaaacattaatatattattttgatgtagatgaagtgagtagaactttccccaaaatccttcattttattttgagtaaataacaatgcaacaaaataatttcttgcgtattattttccaattaatattgatattatacgcgtgacaaaaaattatcacttaaattttgatgagaaaatcatactaaaaacactttaaaaaattgtattttattttcataagagtaacttccctccaagtaatttcaatctttttttttataaaaaaatacactttagaaaatttggatttgtttaatgagaacatctcattttaaaagataaaataaagaaaaagaatacttatttttttactaataaaaatgtaaggatgacatattgatataatgaaaattttaaatttagttatcaaatatgaaaaagtgtaataattttatgaaccaaattgataataagttatattttttaaggactaatttagtattaagttataaaatttaggaatttaattatcattaaattgtttgtttgattaatttgtcataaattttacatatttaagaactaaatttattttttctatttttaaatgattcaatgtttcatgtttttaacgacaaaaattgatatttaacttgaaattttggttactaataaaataaatagttgttctatcaaaataaaataaatagttgttaatattatatgcagaaattattcaattcaacaaaatatgaagataacacgagtaacaaaatattacttcaagttgattaacgtgtggattcaatgacaataaatgcttaaccaattaaccaaacggacttgttattgattccaatctcatttgttattgatccctacaaacgtgagaaaaaactttcttatccctctctctgtcccttcaccttcttttcaccccactcaacccatcaccaccacactaagcctgcgtgccaccaccttactgtgtgacatattggcctcactgtgccaccatctcctcaaacggaacccttttcgtggtattatttgtgggtgaaaataaattacacagtcatccatggcctacatgagggtgaaaaaattacacgataaaaatgcaattctgtcatataagtataattttttattacaaaatcacaattcttttatgtctatgtcaaaaggacattttggaaatattgttaaaagacacacagagtgatagtgtcaatagcaattccctactactaattttgcactttgaatataaaagcggttccttaaaagttaaaaaaatgaataaaattttatattaacaagttatttaattcacaaatattttttttctctctcttatatttaatatagttaaataactatcaacaatagttgcttcttaaagcaattctctttacttttaagcaacttaaaatcatatatatactaattgtttatttttaatttttataagcaactcattaggcagttctcaatgtgatgctttcaggttggagcacattgttcgcagtaccttgggtgaaaatgcagaacggccccctcttaatttcggccattggccctgcgtagataacggcatgcaagaaatgagatttaactgtaagtttgtaactatctttgcggaagtttttcatctttaagtttgcatagaacgcgtaacatttccccgcttgtttatatgaagaaaattgcgcaatttttttcattacgagaagtagattgattaggagagcaaatgaaccatatgtaatgtaaaccgcttcgtgccaaaattaactcggtttaagctatatatagcattggtctgttcctttccccagctactacatgcatttttttattttttttttatgttaggtgactgattcagttcctatttttctcaatctaccaagaaaaaatccaacgaatacaatgaaacggtggttggatgagactctatcacgtcatatgtcgcagggttggacaaaaaaactcttatccataaaaaatttatattttaattcaatttaatctattttaaattcattaaatggattagtttcatatccaaattcatttttttactttaaatccaatccaattaattagatatgaaatggatatggattggatatttatttagattttcaaatctatttttttgccaactttgattgagattatttttttttgtcgacgtcaactaatgatgattttaagccgtcatcgttgagggtattttttcgttaatgttggtaaggtttctttagtaaacattgattgagactattttttgccaacatcagtcgaatctattttttggccgacgtaagctaggttttttttgttaatgttggtcaagaatatttttatcgacatcaagtaggattttcgctcgacgtcgtctatggtttttttgtcgatgttgagcgaaaaacctacttgatgtcgataaaaaaaaactcgacaaacatcgacgaaaaaatctagttaacgtcagccaaaatatttccccaattgtcgccgatcaaaaaatcctaattgatgtcaacaaaaaaatccctagctaatgtcaactaaaagaaatagtcatggttaatattgaccaacaaatcctagttgttgccaacaaaaatatagttttaaccaacatcagcaaaaaaatatagttaacgtcgacaaaaaaaaagtcctgacgaatgttggcaaaaaaaatattaatgattgacatcagcaaaaaaaaaatcttatcaatgttagttacaaaaatcttaaccaatgttggcaaaaaattagtcactatcgatgttgataaaaatctgtagtcaatgtcagccaaaaaatgcactgactaaaaatctttgccgacctcaaccaaaaacaccattggtcaatgtcgactgaaaatgtactgactaatgttagccaaaaaatagtcttggttgacgtagatctaaaaatgtctggaccgatatctgtcgaatttgctttggttgaggtatgccaaaaatacacaatattgatcaaaaaaataatcttaactaagatcggttgaaaataactcttaaatggacaggtactaagttttcactttttagcatttaataactaaaatctgtaatataatatttaagtggatataaattgaatatatccaaatgcatatccatttaaatagattgaatcttaaatctaaattgttttcttaaaaaaatatgaatatggatttaaaattcaatccatttaaataaatataaattggatacatattggattctaaaaaattcaatccatgctcacccctaataagtcgtaattaaattttgttaacgtatcattaaaatgatcatgttccaattttaaaactttacctatatacagaatctcatttttttattcgtattagttacccctaatacgtcgtgattaaattttgtgaacatatcattaaaatgatcatgttccaattttaaaacttcacctatatacggaatctcctttttttattcgtattagtagaaaagttttggttaaaaagcaacgatcatgttccaatttttaaaacatcacctatatatagaatctcatgtatttttatatattagacggaaagttttggttaaaattcaaaaaaaataaaaaacacccaacgcacctcactctaccaagataataaattatatgagaataatttagatgaaaaatataaaataattttaagaaaggagatttattttttactttttttagtgtgagtacatattagttgttggaaaccatttcggttcgacacacaggatcaagtcttgagaaaaactttatcaaaagtgattttatataaacagtaaattctccttaatgaacactgtatagagtactagtttttattattaattaggtccataggaagaggctaattccatacaaaatgataaatcacgattcaaatattaagagagacgctttttttttcctcaagaaggatactttgcatgcgaaaaactaaaaagaaaaaaatgaaagagaagtttttcttcgacggttagaacacggattaactatgacttcggtatcatataatcataaaggtaaatgctaacaagtattttaaagatattggttaaaaaaattaaagtaaaagtatttttattgaaagatgaaaaattgtattatttatgtttattttatattttcttatgatttacacaaaaatatttttttggtttaatatttaaatcaatgtcttcatgagtaagacccaaacataaatatagtagtaatttataaaatgtttagcatttaatgagttgagaaattatctagaatagacaaagattaagattaagaggcaaaaccaaaaccaaaggaaaggtgttttactttagctgtatctttgtctgtgcggaggaatctacgcccacgcgctccaccccgcaaatttatagacacatgcccgacagcaaaccacacatgatatcatgttctcacatcgcatgtgtgaaactgacccctcttcaactcgtcaatttttattaccattttcttttctctcttctttttttctctccctttaccatataacaaaatttccatttcaaactacaaattttcgtgcacttttttaatcaccgaaaccgttcttcgttgatcgtcacgaacatgcatacaaatccgaattttggaatgaattgcaaaatttttggaggtggcagatacgtttactcctctgcaatcgggatcatgcgcgtagtaacgtaaacaagtgtcaagggctaaacaaggtcgcgacaaaaccaaaatgcgcatcccttcgaagaaagccacgactgtgttcaagtaaaagtctgaaacagataaacgtcaccgttattacgttgctttcaatgtcatgtgataattatgcatcatgcacacatatatatggttcacaacgcatcaacgcattatcattactttattctattatatttgttatttcgaatttaatttattataacttataaataatgatgtactacgaagttggagattttatcagtatttaactgagtgggaactgttgtttggtggaacagacgtgcccacaatgatgaagggtttctcagtgtccttatcctccttatgggttctccttgctctctgttctctgaggtatgcaaccatggaatcttttgcttctcttgctattgttttgttggttctgagtttcgcttgtgtagtccttaatgctacattttggatattttttaagatatgcttgattgctaatttctggttaataaattggaggctagaatccagagcctataaataaagtgttctgcttttttgttcattcacattgccattgcttgctgcttgagcttgtcaaatggactgattcacactggtttcattactctggtggatctgtgaagtgtgaacagaagtctgccttgtgagtgaacagaaatactagtgatttaccgagtattcaaaatttccactgccttttggaattattaaattgaatatgtagttgaagtgctgctgctgttgttgattagtctaatgatactcggataattcaactctgattttgcatttttagtcattgtaaattcttactcttaaagaaaatatctacttacatatttggtctcgaacagaaaatatttttattaataataataaagcactgttgtcattatttcctgaatttatatgaatacgaaaaggtatagagctcactcacatttggggtggatttggtattgctgggtgattttcagaagctggttttatgcattgctttaaatatagtatttggtagctaaatgtcaaaagctgtttgcaaaacttgcattgaatatcgtctatggtaatcatatacctatatggcaacctttaaaatcagtaacataataatgcaacttttgacttagatccacgatgtcaaatccaggaagcccaagtctggttaatttcaattagttaatttggagaagtagacttgaaactcagcataggttttaacattaatgtttactatttcgaatgtgattttgaattaatatagaatataaactagcttccactagagcagtgtgtggaatgacttttaaaccttacaagcaagcttcaattatgtccaaattaattgcagaaaatataagttgaaagtatattaaattgaaatcttatgttgttcaatcatatcctaagtgcaactagtattccttaatcttattcgtcacatattagacaataaaagtaaagaaagatataacataatatatatctgagtgtgtcatttcagtgtgttatctcaaaatatatctgagagtggcctacagcaagctagcctcccaccaagaggttggaattcctatgattccttttgctggacaatttctgaagaagaattcttacaaagtgctgaaatagtttctcaacgtctcaaggctcatggatatcaggtatagatactgcaaagaacaataacttatggatgatttaactgtgttagcagtgctttggttagatattgactgatttctttccatcaactcgtagtttgtcgtggtggattacctctggtataggaagaaagtcaagggtgcttatcctgattctcttggatttgacgtgattgatgaatggggaaggatgctccctgacccaggaaggtggccttcttccataggcgggaagggattcagtgaagtagctaatagagtacatagtttaggtttgaagtttgggattcatgttatgagagggataagcacacaagctgtcaatgcaaacacccctatcctagatacaacaaaggtgttgtttgcatttcttctatgacttgattatttttctttacttctgtattagaaatttgtagtgatggatgccttacataatacattttttttctctaaaaaaatacaaaatggcaggcagaatatgagaatattgttttatcttaattggaagttcttgttgaccttgatttcctcctcgtgcaatttcctagggaggtgcttatcaagaatctggtcgagtgtggcgtgcaaaagacatagcaatgccagaaagggcttgtgcatggatgcctcacggtttcatgagtgtaaatacgaagttgggagctgggagagcttttctgaaatccctttatgagcagtatgctgcatggggtgttgatcttggtaccagttcaactaatttataatctgcttattatgcactatcaggacttgcatcatgtcacagacgacaatcatgatgaatttaaataatttcttgctctatcttaatctaagtttaataactcaaacagttgtactgcttttttcatcaagagactaagcagacagaattcgtattttagtggtccaatagatatcaagtaatgttatcatatcaaggaacttctattttcactaaagataaaaacaacacagcctacttcattgggccacacttgtaaaagttagtttactgcaatttcctttttcatccattctaaacctctaaaattgtgtcggccttttaaacattgttatctctatgttctagatggttcctttttagtccttttcctcttcatctcccccctcctcctttcccccttcttagcttttaccatttttgttttttcaacctcctcgtatctatcattgggttcatctaccaccgattccaattagtttgggttaaaggtgctgttgatgttgatgttgacataggaaaaaaatgcaatagaaattagttagtggactcttaactggattttcattatgatctatgagaatacatatatcatcattttggctatgctttggcagctatgttgatagattttcttctgtccttgcagtgaaacatgactgtgtgtttggtgatgacttggatttaaatgaaataagctatgtgtctgaggtattctgcagttccctctccctcttaccctctccactacctctcattctcacataaacactgagattggtaatatttttccaatgatttgttggctaatcgtatggcatgtcatgacaggttctcagtgagcttaatcgccctattgtgtattctctgtctcccggaaccagtgtgacaccagccatggccaaggatgccagtggactagtcaacatgtatagaataacaggagatgactgggatttatgggaggacgtcaaggctcattttgatgtaacaaggtgattaagctgtctatatttctgtttaagattttttttatcagccttgcagtatgttgcaatcatgctacttctctgtatacattctgtcataaccatattacagaactttagttcatttaattctgaaccagggatttttctaaagctaatatgataggaggaaaaggtttaaagggaaattcctggcctgatttggacatgctaccatttggatggctaactgatccaggtaatgagactaagctgctactttttcatttgcccattatgaatgtcaatatgtcataaccctcatactgtgcatgagttgtttattacttttatgtatgtattgatccagtaactgcttttatctattattcatttgtgtgaaccagaatcctcatgttattggaatatggattatggaattatttcttatccccctattctatctgtaggatcaaatgaaggtccacacaggtttagtaaactcactctagaagaaaaaaggacacaggtattgataaaaaaaagaagaagcataactgagttgctttcctatatattcatgtatctattttgatctgcgtacgtgcattatgataatagactctgagtgaatcaattcttatctggcagatgactttgtggtctttggcgaagtctccccttatgtatgggggggatgtgaggaagatcgatccaaccacatatgaagttatcacaaatcctaccgtgctagagattaattacttcagctcaaacaatatggaggcatgtgagccatctaattttttagggaataataggcacgtgaggcatagaacttatcatgaatcatttcactttactgcaatgacagtttccttacgtcacaagctctattaacttgaagcaccctggagggaaaaaaggaagacctaagaaaggaataaaagcatcatatagacattcattgggtttgactggctgcagtgaatcaaaggcgagtggttggtctattgaaagtcttaaccaagatcttgaaataatctgttggaaaaatggtttagaaaacaagcatcaggccactttctgcgtacacaaaagagaacttcaattcagattgtaatcatgctttatctttctattttccatttatccaacttccatttaaatatttgtgttgcagttaacaatagaaattgttacattggtattgttacagagatggggtgagtatgtatcaggcagactatcgagggaaacatcaattagttgcaactgacagaatgaagttttgcttggatgcttctccaaaacgaaaggttacttctagagagttcaagagaggtacattttctccgtgcagatgggattcaaatcaggtatgttgcagtccatatgtcatgtacaagagtagcgtgtggcccttaatctttaggaagaaatcctgtgtgtgattcattaaaacaacttcgttatgtgcatattattatttttacccctattgagtaccatttgccttggccaatttgtattttattgattctgttggaagctgatctatccggtcttctacagatctgggaactgaactccaatgggaccatggtaaatagttactccggtctttgtgcaactgtagagtatgttgaaggtaaaattttgtaatcattttccactttttagaaatagtttccagggttgcttttctttttccccatttccttgtgtttatcactcataaagcaaattggtcattcatgcagctaatgttaattctggtgggattcgctcttggatcgcaacaggaaggacaggtctctctctactttctaacaaacacttggatggatgtcaagaattttcttcttttctgcaattgcaaagcatcaaaattggaaaaatgctaattgcttaaataatcatgagtacataagaacttaaataacagaatttgcttaatcacgagtaccatctgactcttaaataagggtccaatcaactactataatttcatccacttcaccctctaagaggagtcaaagtcaaatcctatattaattcatttatattaatcttatatatctattcaggggaaatctatcttgctttcttcaatctaagcgaacagaagacggagatatatgcaaagacatcatatctggctaaggttcttcctgacaaaagcatcacttcatgcaagggtaaggaagtgtggagtggaacagacgtaataacaacgcaggggacgatatcaatgaacgtggaaattcatggatgtgcactatttgttctaaattgcaactagtctggcatggcttccaattattttaaacagaaaaggataagaaaatagcatctcattgttgaggcttccccccctctatttaattattactcttcctatggtgggggttaggtgaaatttgtatatgttaatgcagtgtggtgcggtacgtaactgttggatcgcaccgtgtttagacaaactacataggaaattatagttgtatgttagtcagcctcatacctttctaatggttactttgaaagaacacattttattttttaaataaaatcgtggcctaatagggtaatgtacctatgtagtggtgttgttacttgttagggctccatagatcagtgtcatgaatgtacgatgacttaaagaacatgatggtctgtactgtagtgaaaaccaaaacgaagtatctaaactggaaactacatgcagttaggaaataaaaaatgctcgtagtgagttaagcaaaatgaccatcaaaaagtaacaacagaacagagtaaaaggccaaaagcctacttgccactaccacttaccattcagtgttatatgaaacttgcatctttttgtaactaaaaaagaaaatttttgtttatgtctgttagaaaacgattgtttgttactttgtggcccccttgaattaaggattcgaaaaaaagaattaaggattcgaaaaaaataaaactgcaccgaaaagcaatcggattgtgatattcacggccttttatgatatcgtcaatatttgagattgtggtaagttattgagagtgaaaaattcaagtaagagttttcacagaaaaaattgttgatgagttatttttttataggcatgagcagtcaattaaataaaaaggaaacaacacaaataaaaaaagaaacaaaataatctgttatcgaaaaataagattgtttaaggtaaaatattcttcgctgttcttcgttaaggtaggaaaattttatttcaaatcaatatttttaatttctttaatcaatactttagttttctgatgaatattaaacatgactaatacatttataaatttattaaaaaaatgttggtttttttagtataagttttatgtaccgtcaatattaaatttgtacggtcaactaattaaaaattatcttaattataattttaaaaatattttttataaaaaataataatcttattatatatcatatttttaattgaataataatatagtatttttacgataataatataatattaaatagtgtatctgactaaattatatatatatatatattttttctatttacacataaatatgcgcgctgatataagttattaaaatatcatattcggatggactaaatggacttttcacgtacacagcattagggttccaaaacctgactggtacataaacgactcgttcaactcaaattgccgcactgcaactttgctctctgtgaggcttcaatttccaattagggtttcgctttgagtaaccaataaccatgggagtcttcacctttgtcgttcgcaaatccggcgccgaatggagcgccaagcaacattccggcgacatcgaggcctccgccgactccacctacgatctccaacggaagctcgtgcaagccgctctcgccgttgattcctccggtggagtccagtcctccttctctcccgtgtctcctacctccgctgtgttccaggtacacattttcacatccctaacgattgtggtttcttgattcggagataaaacttcacggtttatgtttatcctgcgttcaacttcgatcctttttatttgtattattttgattttctagaatagtacattttctatgcgtcattgcactgtgcctgtttcgagtattgcttaggctttcgttaggctatttttcattgacgaatgtcctgaatccgagagagtttgctagtttggttcttgttattcatttgtgagattctgttgtggaattaatagtttgactttattattattttttctttattattttttggtttttcattcagattactctgagattatgcgctgacttgaagagaattataggttttagtgctatgacttgcaaagcttaatcattgttcattacctgaaagtatataatttgtgcacacataaaacaagtacaaatttagatctagttactttaaagcttttagtgcaattttgaaaatttgaagttttactctggtaacatttgctgatattttttagacaatttagttggtattaattttaaggatgttcttagacatgggactctgttatttacagagttcagcttctgtccattatagaaaactgactcttattttccatagttgaagctttactctggtaacattgcttagatgatgatcgaaatgaaactaattttaattggagaacaatacttaatacacttgtccgactaaatgaattattgtgctattgatgattgatggtggcatttctgccttgctggtttaacttttggattcaataattaagtgggtcactgaggttatttttcctttgttgattgttttgttcaggtgatagtgggtggtgctgtattcgttggaggtggcggtggtgctgttgcagctgcacctgcagggggtgcagctgcagctgatgctgccccggctgctgagaaaaaggaagaaaaggtggaggaagagtccgacgatgatatgggattgggactgtttgattagagtttttctgctttttattgagttttgatggaaaagtgtttttttagtgtttaatcttataaattgtgtttgtgtattgcttttcaccagttaatggtacattgaacttcgtcagatagagttatgtgctgtgacccaaatggttcttctgtattgggttttagtaggtattttctttttcaaacaaatgtctcgctcttcttttatcactggcggatagagtattgtgctgatcaagcggttttgctgttaatacgattttcttcttacatgttactggacaaacacagccatacatgtatgagaaatagtcttaacaaatatatttcctaacacttttgatacattggtaaaatttacgtatgtttaaaattgctttttctttctttcttttctcatttattggtagggtgctactaggacccttctaaatataattgcttgacataattggatcaaagaaattgggtggtttgcaagcagcatccaatgcattgaaattgagtgatacgccaaactaaaataccaagaatcaaactaaaatattttaataatttcaaattttggtataagtttcatatttacattctactttaatttaaaactttcatctcaattttatttttttggaagggaagatgaatttggcaatatgcattagcatatataaaaatattaggtgagaatggaaatccaaatgtataatttaaatgaatggctaaaattaaaataattttgatattctgatgcaattatatggttaagatatatgtataaggtggcaatgtccttatggagtatttggtgtcggtggaatactaagctctgggaaggaaggatggagacaagctcaatggtaatatctggagctatgtctgtcctgaatgatgggcagaaagctaggacagtgcaggaaggaaatagggagttggatatttcggaggtaatcataaacccgtaattaaatactcatggttttctcaattgctatgtagatacagccattttcgaagaggataataagactggagtgggtctctgcctaagggatgaagttagagtttttgttgcagtgaagacagtctggttttggttggaaactgattctaaacttcaccttcatgctttctctcatccgaagattgtccattggacactttacactagatggatgaattgtaaaaagttcactgacaattttaacttcaaaattattcacgtttatcataaagacaacttgtgtgtaaatagagctgtctcttttgggtatacttggtgggatcctctaccattttttgtttctcacgagtttcttaggtatagacaaaggctcacattttatagattcccttagtgttattccttgggtacccaagtgttttgtattttcgcttctaatgaatatatttagaggaggatcttttttgggagattaaaggttgggatgtcaacccccatctgtccttgatccttcgtctttctttctttacttttttttttttttttttaaaaaaaagatagcttggtttaaacctgctttgcagcctagagaagggaaagcacttgccctcttgtatgcaagtaaatgatgtgctgagaggggtgagcaacaagttatcttcaagactgatagcaaagtagtggtagaccaactgcaaaaagaagcaagagatttatctgaatttggctcgatacttgttgattgcaattgctcatttacaactttttctagttatcaaatttagtttattaggaggcatatgtgtatggccctaacttagctaggaaatcggcttatgcagctaatccgtagatttttcattttgcctttgattgtaatgcaaatgatattttaataagaatgatatgatgtacttctagtaaaaaaaatatattcttttcacatccaatgctaaatatataacgtataaataaatgataatataaacagtatcaaataaatattgatcatacaatatacgaatagttaagattgttagttttaattttaactatttatttgaattatacaatttacattgtttcttcttatattcttataaggatggtgtatttttaatcagaaggaaggctcaaaggtcgtacatcatcaggaacaacattgggcaattggtgaggaatgtcatcaatcaaagatatatcatgttctataaaagtaaggtgggctacacaatctgtcgctttattctcaactctatttacaaagcaaaatttgttctattcagcaacagagctcagtcttgaatcacacctgcaaagtagttgttgtcatgaaaacggttattattcgaagcatccacgagtcttttgcaatcagattcataccggacagattataaaaggaggtccgttgcagtttcaaggcccagccacatgtggttcataacaatgacgactgagtatattttggcaagtcctcaatgccaagttgaagcacttaggaactgtaggaactgtccacagcttcttccacaaatccccattcactgagctagagcagaaattcttgcggagaagaataacaagaattttgccagcaactgactcattgcctagactcatggtcaatcagaaacataacattgtgaaaaaaatgttaaacaaacataacttttttaataaaagaaggatctaatttttttagtgtgaaagaatgatataatagaaatgcaattgtagtatgaaaaatagaatacacgtgttcaagaaatcaagaattgttaagttcttaaaaacaaaaatggttaacattttctatcactcctttcaaaaacaaacatagagtattagccaattgattgatattgtgaaggaaaaaaaatgaactacactaataatgcattaaaatcaaacttataaaagaaagcaaaattactttgacaatgctattattattcaaatttaaactcgctgtaccatttaattgagaatagtgtgtacttatattagacatagactctgatataaaaaaatagcgtgtacttaagacattattattgttatttacaataatattcgaatgtcctttcttgatgaaaggttgaaatctttttttttttatatataaaaaggttgaaatctttctttgcgcgtgaagcattacattgcaattacttgacaaagtcttttcaaccaatcccaaacatgtagatatttagagacaagtactaataagttagttgagtgccaccaaagtagaaaatcatagtttatgatgtgttatgctaatcattcgctaattagattaacaagaattaagtagtcaataatgatttagttttgacattaaatagacgatggacatagagagggaccaaaacaacggacgacctttatgggaggccaatttaggccaagttagactcaataaacaaaatttcgaattcaatcgaatatattttgatttattttttttagatttatataaatatagacaaaaaatttaaagtgggttaaataaattgatccgagggttcattgaacttgactgaccaaaaaattagaactagtccacttcaaagtatttttcacacttgaacggatgattttcctagtggaatcatatcccaactttgattataatttttgttttggttaccttgggtcaggcttcatgtcctccaagttatcttgccgtgttctttctatgaatttgggctttgctattgaggcctgtatggtgtcaacctaattcacatcagtataatcacttatttttttaatcggcaaaagtataataattatatatagagaaagcacaagctgtgcaaaatatagtgtaccaggcatggacacctataagtttgcagcaaatacaacccacccataactatagaaaagtattctcccacgaacagaggttaatcactattactgattatacaacacatgaataatgattaaccaaatgtgaatatacccgcagaacaaaaatcagcaagtttatccacataacctcaagaaataccaacaaggacttcatcgcccatacatctgcaccatctatcaagacctcgagatgcctatcccaacaccactgatcgcaaccacttggtcttagcttagttttttttacgtaaaaaaaaataaatagaaactctacttttgattctttcctcaaatgctagtaatatttttctttatgttttatacgtttatggtaaatacagcaacagtgaatgaaagatttattatgatgttaaaaatattttaatataaataaaaatattgattatttcttaatctgtgtgctattatttgaaataaacatatgtttttttagactaaatattatttaatggtctttattattactttcctaataaagtttgaattaatactttcatcattttgatgattgatttgaattttaaaagatcgaaatttaagaagcataactttaaatgaaaaaagaactattacttcatccatctattataattattgtgtatatgagaaaaaaaattatccaaaaataattgtcattttaattaaccaattttaaacttaaataatgatgaataacaaaatttataaataaattaataatggtataagattatttttataaattttttatccatttattattatttttagcctgtatcaaataatttaggacaatagagggagtattatttttcatgtaaaagaatatgtaaagtaaattgaaatgatgcacgaaaaaaattgaaatggaagaatacaacaaaaagagtaatattatttacatatttttataaaaataatttttttaacatagtatttatttttaaaatttttatttatttcatttacataaaaatagttgtgaaattttactctataaataacaataagctacagaagaaggaaaaaaacagaggtcaaaacataactggtaaggtagtaaagtacacagaaaaagaaagtcaaaacgaaaaaataaattaaagtgtgatagctgcgacggcaagtgcttcaactagggttctagcgtacgagcgaatctactactgtattttataatataaaattaatttatgaaactctatttataattaaattaaaaaaaatgctaaaaatatctatggccttttgcactgaaaaattgcctaaaataaaacattaactaaaaagaaggtgggtaacacgacgacgcattgctccagggccatgaatacccaattggaatgaggccgtgaacccctcatccgcgcgtgagcaattcccaaacccacgcgcccacgctcccaaatgaaacacacactaatgttcccttccttcccattctcattctcaattcgcatcaacgcacgcacggacgctctcctaatccccttcctcttcctcttcctttgcatgttctcggagctccggctccactagcggagccccggctcagttcaaacccatttgcgaaaacaaaaacaaaaaactaaactccattttctcttccctttcgagatctcgaaatgtcgaaaccctggggcaacatcggagcctgggccgccgattccgagcgggccgaggccgaggaggctgaggcccaggctgcggccacggcggtcgagccccaaagctttcccagcctcaaggaggccgtgaactccaagcccaagaagaagaagggaaccaccatcacgctttccgagttcaaccgtggaggtttcgaccagggccttacgcgcgacgagatgctcgcccttcccaccggtcccaaggagcgttccgccgaggaaatgcagttaaaccgccttggcggcggtttcaactcctatgaccgctccggcggtcgctcgcgcgaccgcgacggcggcaacaacgaaggttcgtggggcggaggaggcagaagatcctacagcggattcgacgaggagcgcaggggtccgaatcctagggtttcggaactcgatcagccgtccagggctgatgaggttgaaagttgggcgtctgtgaagaaatctctccctgccttcgattccggtcgccagaatcgctttggtggcggcggttttggtggtggtggcggttttggtggcggtgctggtggaggcggcggcggcggcggttttggtggtgcgtctagggctgatgatgtggacaattgggcggttggtaagaagcctgttcctgttagatcttccaatttcggttctggttttcgcgattcgggagtggagcctgatcggtggacgagaggcggtccgcctcgtgaggttgaccggacggagcgaccgaggctggtgttggatccgccgcgaggcgatggtgtggtgaacgagtctccggcgaaggcatcgaataaggcgaatccgtttggcgcagcgaggccgcgggagcaggtgttggctgagaagggtttggattggaaaaagatggattcggagattgagacgaagaagacgagccgtcccccgagttcgcactctagcaggccttccagtgctcagtccaatcgttctgagggtcccgggttgcagggaaccgatgctgtggtgaaatcgaggcccaaggtaaacccctttggggatgccaagcctagggaggctgtgctgggcgagcgaggcatggattggaggaaaattgatcttgaattggagcatcgctctgttgacaggttttgttttgtttgtttttgtcaattgatgcttttatatttcttctttgatctgttttttgaacttgtaaatgttgctttgtttgtagtggatgattggtaatggtcttagattggcctctaggctttttgtttgaacttgaatttgtgtctgatcataccggatttgctcgcattattcaatagttgcataccaaaagttcttttgtccccattatgcaatgaccataaatgtgcttaagggtggattgttgtggtgtgttgaattagtttgatttatgggaatatttacagattaggcatatcatatgggcatgatttgtaggtaaaatttaatcaagagtgtacactaggattggattaaagcaatgacatttcattagactgatcaataaatggttgggaacggtttatttagagttggaaatgcttttggtagagattttggtcgtgttgttttatatagttcatgtattgttcaatggttactactctaattagacggtggtcgtttttttactactctaattagtaagattttaatgggagtaagagaagagtgtgaacatcattattttttatgatttaatagtaaatggttactatataatatatattctattcctagatcaagagctaattgtgagtgtcatatagtggttatgaaaaataagataggtatccatgtaataaattactacgttaatgaagcttccttctatttttctctgttaaattcagaactatatggtttgtaaagctatttgttgttatttcagttaaatcttatgaaagaaatcaaaccttcttaggatgatacatgaattatggatgccatagagaacttctgacttcccagtcaagttttatcatgcctgtaaaagacttggtatctgtaaaataattattgcctcatttctttagttattgaaaatttattgaatgaggacaatgcccatggtagatgcaccacaacaatcatgtgtggaatccatgtgaaaattatgcctgggattttatgttggtatatgtatacctctcacttttgattatcattgaaaggtttttatagttggcttctagtataaattctggggtttatttgtagtgaatactaggtcatccaagggagtgatacctagccccaccttctatatcttagggacagaatgaagcaaatatatccattgatattttttcaaaacagaaatgagttgagaaataaatatctgttggtgttagaatattaggggcatgtgttggatgatgaacactttttgcaaatgttataatcgtaattgaagagtcgagaggaaataaatagaagtttgggatgttgagacatgctttggattcacattgtcgattgctcttgtttaaataaacatactttttaggagaatcttgctttaggttgtttatttgggcatgtgtggagaagaccctattaggagagtagattagatgaggggatcctaatcactagagacaaaaggaaactgagaaaactatacgagaaaccattaagaaggatttagaggttaatggtttgtctatagagacatgatttattatagaaaattgtgttgtcatttgatccttgtagctgattagtgggaaaaggcttgattgttgttttatttagttctagtgttgtagagttgagattgtacttgcagaagtagtacttcttcaagttaaaaaaaaaactacgtatctcattgttcagaggttcctcgctatgcgaaggtaaggaagaggaatattgtatgcagtcttacccttgcatatgcaaagaggctatttccaaattcgaaccctgaccaacaaatcaccaacatacaactttaccgctgtgtcaaggctcaccctcaagtagtacttcttcaagttattggtataaatagtgtatcagacttatttttggttggttactactgtttgttaatttattttccccattctttttcttcgaatccggaaacaacctctttgcatgtgcaagggtaaggttgcgtacaatatccctcccccttacttgtgcatagcgtggaacctccgggcaatggtttttttttttatttattattattctttctcttctaattcttaacctataattccaacatgatattagatctgtatcttccttattgataaggatctgtcttttttgcttcactgagcttgtcaaagttgtgttttctgatctatgattttttatattatatttttaagtctccaatccttgttgtgacctaagttcgtgtcctaaacacggcagaatcaaccttggctggtgccctgctgtttaagtgaccaaaggtgggtggttgctggtgtttgcaagtcacttttggtcagcctgggtgagataacctgctggctatcgctaactggctgtttttctggctgcattctgttattgaaagctgtcctaggattactaagtttcagtgttatttgccttgggcttgtagtagttgtaccagtactagacacaatttctagtgtaaatagaagtattggattgtggtattgtatggcagatatttatcaatttcagtatattggttatctttctatctttttcttcttccttacctgaaccttatatttccaacaggtgaattgctaatagtttaatcattgttctatatcatttactcctaatagtttggcattaatcaggacttgctttcataaatctctatcatctctttgtttattttgttcgtcttgccagattatgcacaacattgctacataattttgtgtaattaattgtgaattgttgtctttcaaaagttctagttaccttgttgactcctgagttatttcaggcccgagacaatggaggaaaaattattaaaagaagaaattgataatttaaagaaggagcttgagaaagagtctacaataaattcaaacaaggaatctgcggatgaggctggtggagatcaaaccagtacacgtgcaatattacaactgaaagaaaaggagctggaacttcttatccgtgatttggatgacaaagttcgttttgggcagaaagccattgaaaggccaggttcatcggcaggaaagtcttctactttttctgataggccacattctagatctggctcctttgaggattctagaagtgtggattttacagacagacctcgatctcgtggtacaggagatatgtggatgcatcctagtgatgacagaagacagtttcaaggtagcagggaaaggggatggttttctggcagcagagacctaaataggtgagtaataagtgttattcatacattatttatggcaactggttgattttgaattcaattttgtttattctcttgtattatttggcatatatagcttttacattttgggaaaaagtgtttgagaatgttgatatttgttgtcctacaggtcaacgtcaagagatagatggtgaacagcagttttgtgtggattaagagttatcttcaacttttgatgaccagaacctaatactactattttattacttgtctttctaatcgttttgctcattttactccaggcaattggagcaacaatcattgagtaatggcactaaaacttttgcctaatctgttattgcatctcgaaacattgtaaatttgttttcccccttctggtaattttttgggtgtctggatgaaggcagaaagcctgtaattttattaggacaaaatttttattgagaatcttgaaacttactagttaatgttaatgtgataatgttctgaattctgatataaaatgatttttcttcaattttgcgtctgcacggtattgtccagtttagtgccgtaagattggtagcttaaagccgctatcctctacttgtaacattggccagttttagtatcatatttttgtttgaaaatggatatcccagtatttatgtattatcctgtgctatccttaatattggaaagtaccttttactccctaaaggtccttgactatggtttggagaatgggatgaaaagtgcatgctaagttatgattttattactggatcaaacaacccctaagagtttttaagtttatctgctgaatctgatatcaccaaccttgggaaaaagttttaaagagtgatatttgccatctctatgacaaaaagttaatagttatagtcacgtctagtgttgtgtttgcttttccataaactggttccgtaacattgtttcattggttagtttaaatatgcatcttcatacctacttgaaaagttgaggtgttagtggttcttttcatcaacggtggtcaaagatgggaagcttaacgtcgttcagctggatgatttctgacggcctgtggttcaaaggaaggggaagagactcaagaggggcgggagattttaagactagcgcttcttgtttagattttaaaataggagaatttaaaatttagcttattaatgttttaatagtatacaaataaaatcataagttcaagcaattgaaattttcaaacttattattagtaagtaccacgaataaaatttaatatttttcattctcttcaaatatcttttatatcagtacctagctcgatcaagatccaacatttgggacaagatgaagctaattcaatttgctgacatgatatattagtcttaatagctaaattatagaatttaaaaagtatacaactataaaaaaaaagtatataatatcatgttaaacaaaacattatttattaagtcagaaacttttaatattaatgcatagaaaactatgccttttaagaatgtataacattggaccaaattaggacaacttattaacttgaatcagtctttaaatacattggtctaatttcttaaacccaaatttgtcaaaagttccctaaagataggccagattggtggaacgaaatgcgtcatgaacattcctagttggaggaaaatgaaggagggataggataattgtttaattttttataccttatttgatttaaaaatttggaggaaaatgaagaaaaataaacaaagagactaatatttttcttctcatatttttatttttccttgaatattgagaagaaaagcaatttataatttttgaattatatagactaaattattccaagattgtattttctcttatccctgaataaatacataataataataaaatattttgatatagtttatgagtatacttgaagtacacactcattaatttagccatgcccaaaaatacggtaagcaacaaaaaataccacatgcatagggttatgaaattttcttttgttgttgttgcatatttaaacgtggaaaatgtaatgaaatactcaacatgcaatgttttgaatggaaaggttttgaggagggggtgatagcatgctttggacatggtgagaagtcggagtagataagatagatatacttaattgaatctcttttcttaatacaacttcaataatacagagagatgtggagcaaccaagagggtgaatggaacagagatcatacccaatttcatgcaaagatccaagtgtgaggattatttgggacggagtccattgcaccgaagctgctaataaatggatcttccaacaaatagtcaatggctccttttcagatccacctaactctttaaaaaggacttgttatggtaaatcatccatccacagcgattaatccattaggacacataaattcatgttcttgtaagagtgaatttcgatccatgtgcttaaactgacaggtcttatttagtgtttaacgaattatgtttggcaaattttatttatcattgatgtatatttaatgacatttagcatgttaattattattattacgtgttaaacagggtcttattaacgtgctaaattaagattttaacatatacaccttgcaaagaaaataattcatagaccttatgaaacaaaaaagagaaatataatcaatactataattttttttgtttttttttatttcctttattcttgtgagttttgattgctcctattttttttaaaatttattctgatttttattctttcaaaattagtattttgggcgattcatgattgtttctgattaacgagtcattttttcgcaaccatgtaacattttataattttatgtagacaatttaattaaccttttggtcactctatttatgtttggtctttatgtaaatacgtaattaataaccaaaaataaaaaatgtaaacactcagctttgcctttttcttttattttgttggtcctttctttttgtactaaagaacgaaatttaaattttcctcttccttgtatttgcttgtcctttttatttttatgttaactagagaaaaagaataaaaaataattagttttttttatctttccattcagaaaacaagaatgaaaatacatttaaaattaagttaggtataaaaaaaactaagacaataatttaaaaaataaaacaaaaatttggaacaaagagtctgaaaaaggaaagaaaagaacaaaatacataatttataatgggatgttaaagaaaacaataaatgatggcgataaattccttttgttctttattttttacatttttttattgataagaatcaaaagactatataaaaaaaaattacaatagatttatataactatttactcaattagattcctggatagtatacaataaatataagataaatatttattttatttttaaatgtgtaaaaatcaggacaatttaattattgaaagaacaaaaattgtcattaaactgagttataagaaaaatgtaactatagcaaatttttagacatttaagaattaaaatgaggatgagataaaaaaaatagtagttttttagattgaagagttgttgtgctgggataacatacttccctgtagatgaatggtagaatgagaggaattgacttatctccacacttgttgcaaggaacgaactgtcctgctacgccaaaatttagttaagagttggcagaatttgtgattggtttgtaagttgttgtaagttaggtgtagctaaggcaaatgcttgtctcaggtgtcactcacactttctgccccttcaactccaaatcccaccgcccatttttctcaacacacaccccttcgtgcttcctccaaaccatcaacgctaaccctacctccgattccgatgacgccctccgcctcaccgttccttccgccgccgcagtcgccgcctccattcgcaaagcctccacctcccccgtccaattcacccagcagctcgagaaccagcgccagagcggactggtgcttcccagcaccgacttccaccgactctgcctccaccagcttcatctccttcgcagaatcattcccgaaaccctcctctcggttccgattctcatttcctttctcctatttttttaattatctcatctgcatgcatccttgttagcttcaattcaagtcgcttaaatataccatcaatttcatctctcaagtattatcctctctaccaacaaataacaagtcttagaaatcgtgctaagtactctttcaaatattgaaaaactcttcaaattgatcccggactattattaaaatatatcaattttctatagatcaaactaatggatattcaatacttgagggattactgtggagagagaataatactttggggtggcgggggggggggggaccgaattgatgattcattcgatataagtcaaacaaactctaatctgcttctttaaattagtatcatccatcaatcaaggttttaagttgccatccccgtttaggttttgttgtaatccatttatattgcagaaatttgagggaaaatgcagttgatataattgcaatttcagtcccaaagacaacaaaagcctcgatgtggtggctgaaatcgcggttgcagagtgttttataaaaccttgccatcaatttagtcttgaatttggccaattttgttgggtcttcgtgtatgtgcagattagtcagtcaattgggtccctcatggctttaaccaaattaactagcagatgttaggcactagattggctaatttggtaatgttagggaccaaattggatattgatccaatttcatggatcaaattgatcgacagattgttaatagagacagggactaaattttttttttttttctttttgtaatatttatgaccaagttggctgttattgacaaatttagaaactaatttgatgttttactcaattttgggattaaatttacattcctaagtaagcactaaaatgtctgctttcttaaatttgaactgagtgatgtggttaaggagctattttgtttgctttgttcaggtgtatgttagaccagctggtagttatgtgatggatcggttggagctgcggcgggttgcactgtaccctggagatgcggaggcagaaggcattgtcattcttgtgggtcattttaatattcctgcaggcttgcgtgctgctgaggccacgctttccaattcgcaagtgtgttgaataccttgagcacacaatgtgcttctcttctgttccaccgtgcttgattattcttgttgggtaggatgaatgttaatataggtttgaatgttaattgtaggttaatgttgtccctgaatgtaaggctgtggttcttccgatggtgaaacacccatttgttgttggtttcttggttgctgagcttccgttggtggagcaggaacagtgtcagaaatctcaaattgatggaccagaaaacctcatgtctgttgaggaaccttattcatttcctccctttttggatttagataagtcaagggaaattcagaatcttcaggtcaagaatgaggcagttggtatgcataacttcacttctgagcaaagatcaaatgctgtcaacatttcacagtctctagctatggcatatgtcatggatcaggtttatatactgcatctttttcccctgaaaaaaaagagagaagaaaaaccattacattaacgcatcactattcaaatatgaaatgctagaaagtttgacgctactcaaactttgtgggagttgccttgaaatttgcatttcataacatttggtacttgaatgtgtgctttgcaagttgttgcattgaagttcacaattatttaatccatcactcgagtaagactgagtaactgttagtttttagattgcaatgcaagtcttttaatttatttctctttaacttttatgtatggtttcacggctgttataagaatagctttgacaccttgtatgggcctaaatttctagctcatggttatgctacttttacagaaagcaatgttacttcagcaatcaacatggcaaaataatgtcaggatgggtaatctggttgagcaagtatgagttattgactgttgttgcattcctttaatctctcattttcatcctattctaattttttttttaatttatacagatccgcggtccactttcaagtattcaaaccttaagtaaaatcctgtctacacagacaaagagaactcaggtttgaaaattgtctaaattgtacctgataattcacatgcacttacatttctgtaattggggaacccaatagctgggttggacaaagtcccagctgaactgacacatgatcatgtctagtctctgactctacaatgcacctttttaaagcatcattaaattacttttttaggtggatttaatattctgaaaagtctttatttcagcatgcactttatgtgtactgaatgtgctaacttagtgagttggtgattagtagctatcttattcatgatgccttgaatcgagttctatcatagttttaaatgcaaggatatagatgtttggtaaaaatattactaaataaatatagatctatccagaaaattagagtgaacatgctgcaaaaggaaataaagagttcaatctcaaaggatgttgaatctaaactatagttatccataacttatagttattgaatgtcaaaaatgtcttataattggtaattgcacagatttcatatgacattgttgaagacctcttggtgcaaggtgatcgtctgagggatgtcctccaacaactacaggatgctgtttatttgacaaaggtacttctttctcttgtacttataatcatgcatacatgcaaatacattttgtatacctacaatcaattaatgacttattgaatttcaatgtacgttggttggaagatcttgaatcttcatcacttgttgtctcttgactcttcctctatataattttgcatgcaaaaatacacttataggcaatgtgccttgtcacaaaagtaataaagggatttgagtcctaagtatcatattcaagggattaattcaattcatgtttattgaattagtaaattcttttaaaccttttgctattcaaactatcaaaaagggactactgcaaaagaattaaaagaggaagatgaattaggaatttaattcccaaagaagatgaattaagaatttaattcccaaagaacatgaattaagaatttaattcccaaagaattaaaattggctagggctctggcctcacttgcattctaatttctctatacttatgtgttctcttatcagttgtgaatcacctcttctaacctattagcaatctgtggtcatgaactgttatattatttcccttgtcaaaataccaagtttggtcatgtaaggcacaaaacaagaaaagcataatgaaccaagtgacctgttaatttaataataataaccaattggaattcaagaattgaggtttggtcatgcaacaattctaagtgcatgtttgattcaacttattttggagaaataactgcttatttttgctagcttgagaacttatgaaaaacaatgatttcctcaaaattaatcccaatcaaacatacatttaacctaatttatcctataaatctgttaattaactgtgcattgtcatcaacctatcaattaactcaagtcattaataatggccaattcctaacatacaacaagtacaataatttaaacccaattgaaaaaggaaaaatacaaattatattaacgttaagtaactcccagttatggatttagttactcatgttcaaaagatatactaaataaagcaagaattcattaaacaatccataaagaacaaaaacaaggacccctttgaaattcataaaacacaggttcctaaagtgaaaacgtttaaaaattaaatgttattgaaataaacaaaaaaggaaagcaaacactgatagaaaccagtgcctctgatgttcaatttttgtccaatatgtagacaaatatagtgcgctacaatgaagaagcaatcaagaaaatgaatagttctactcacatacttgctgaatcatcaagatctcagttgttagatagcaatccaggtgatgtctctgcaaataaaatggaaaaatctagtgagtcactttctctaagtgctgctgtccaggatatagagatgccactaccacctttggcccttgctccattgcaacatggaatcaggtaggtttcattggttggttaatgcttatgcttcttttcatagtgtcatgacttatccccatatcttctatataatatattctcttgattctgttatatcccataataataaactcctaacttgcactttttgttgcatcaacaatcaataatatcttatatagtttgtttctttcattagcttttagatatttatttcttttacctttcaacagttaaattttttctgcatttattttgcttatgcttttcattaatgtcaggaagaccatgcaatgtttctgaagtattggcagacttggttgattcagtgagaccacttgcccggggtcaaaaacgtgtagtagaactaactgaactctcatcatcacctttgctagctgctgtagaagaacctgcattgcgccaggctttcagcaatcttattgaaggtgctttactacgcacacatgttggaggaaaggttgaaattgtatctacggcagcaccagctggtggtacccttgtacttattgatgatgatggacctgatatgcactatatggtaacttcagcccactcccactccttgctgtgcttactcatttttcttttggacaagctggaaattgttttatgcatgtaatttgcaaatttgaagcatctccatgggaaacttgggaacatttaatgctttggacttggcaaacagcgcattgatgccattttgtgagggaattagtgcagcttttcccaacgtataatttgcatgattcataatcatagtgacatgtctgtaagtctatagaaatgtggagccctccataaaattaccattatattgttgatattcgaagacttcctttgtggtacacatagcacttgattcataaaatatgacatctttcaagcacttccttgcttcttctattcaaacaattcttcgattgagtgctttatgcctagggaattgaattttgtgaaaatggaaactaattgttggttatgaacttgcctgcagactcagatgcactcactcaccccttatggacgagaactgttgtctgataatatgattgaagacaatatgacttggaactttgttgctgggttgactgttgctcgtgagatactagagagttatggctgcgtcgtccgcattgtttcacctcgtattaaagatgctcctcttggagctgggggaactcgtgtggaactctggcttccttcatcaattgtactgtctgatttgagtagccacgcccaagaggtatagcatgagtttgaagttccattgaagataaatagtttccttctcatacaattctacattgtagcacttggccagtatataaagattgtgaaattcaggagtggtagatattactagttctttcttcgttgttgctaaatataagtatccggttctgtatatagctcgtaaaaatttctttagtagagtttattttatgactttgctgtgtgtcaccatgtaaacaataacataataaacagtgtatgcatattatatgacaggaaaacttgttgggtttttacaagagaccacttatctgaagcttcagcatttgtaccatgcgaatccccttaatccaatataaataaacgaaaagagattgacctctttgagtaaactaaacttcagtcggacaatcttccctttgttaaaacaacaaaatttaggtagaagactaaaaagagtctttcaaccaccataaataaagaataatcgttattaaataaaattaatagatatatatatatatatatatatatatatataattatttagttgtttaaatttcaactattcatttcaatcaaaatgacatggattccccggagcccggacttctttagactttagatgatagaatgcataataattgttaatcagaaaattaataatttaaaatataataaattcattcacatatacaatattaaaatatcaaaatgcattttaacaatttaataatttattatatgtgtaattgtgacaatttcaagcaattaatatcattatttttaattaacaattaaagtaatactgtcaatctgtcatacattgttagtctccataccaaaaaaaaaaaagtctaaaaaagttattcctttaactaatcaaaaatcaccattaaatatcttttcataaaaatcaacaaactgaatgataatatgtgattgaataataatataaaattatttacatttaaattaaattctgatgatattacattttttttcctttaaatcaattttacattttaaaaaacaaattaaatttatatccgactactgctgcatatgataggctctaaaagaccatcccattcacatattaatatcttatttatcgttaatgtgtgttctgctagattccagtgaatagtggtggctaataacagtttcttgacctttcgctaacaagcaagcctatctatacatcctccaatttatttatttatttatttatttttttttttttgaggattgcgtattgctccaatcattttcaaagattagttaacatatcactttctccgacaaaacatacatgcatctaaatggggcaatatgctaaagttttggtgaggctataccaagtatgaaataaagaattgaagtttcagcccattataaaaaaattagttccttctgaaatgaaaagagcatcaaagaagatatattcagtaaaatctttttcataagaattgatctagatacatcaactttgatgcgttggaaatactgtgctcaaatttgaccctgaaaacttataaatccaaatttggcctacgtagcaagggcctgtggcacattaaatataaatttcattccacacaaaattgcttagttttggaatttcttttcaccacaacagaagctccagacgattatgatttatgaccttatatacttgtcacttatgtttttcgatattagtcatcaataaaagtaattgaatattccatataatataataatatggtaatccaaaaattatacttgtgagttacgccaaagtaagaaacgcctttaattgctaactattaccaacttttttttaaaaagctaatacaagtgacagaagcttaggcctctataatttgaagctgtggcggtggaactcatacttcatgttgctgaaagaaacttgatatttttttttaaggaaaataatatcaatgctcctaagtcctaaactatatgtcttggcagtaaacttaatcttcttgattaattaaaccaaactaaaatttttagggtatatatatttgtaaaaaggagtatggtttaggatatgattaaatactcttttaccaagtaaaattctgcaaatgatttgtgttatgaaaaaaaaatgttgagggtgattagagagttgagaaatgttggtaataaattattgattgatcaaacttacaactttattaaatcatctggaatcattttttatagaattaacatgactattaagataataaatattaacaggtttataggagcattaattaaaaaattaaaaatatagtttattatataaaaataaataaaacttgttctaatcatgtttccttaaataatacttatagttaaattttacacaaaatccataaaattgctacctagctaggtggggaagtatcccacttaaaaatcaataaatattttctctgcgaattaatagttatctttttatctattgtagattttgtttttatcaacaaaacaaatgttagtttacattttttgttaaaaatatcagtaaaaaaatttaagcccattatcttttctcttcttctttcttcatccttccttaagcctcttttttttaaccaccaagctcatctaatacagacttgtttgcaggtgcaactgtatgctcaatccctcccgcttatctccattgctttgcttcttgtctatttttacagatacaaggacaactagtgcaacctattttacaagatccattcatataggccattttgtttagctagattattagttcatcatcatcattctacattttactattcgattcacataaaaaatagaaaacacacacacacacacacactttaatattaaaacaacttctttgctgtcaataatcaagataaacattgggcaacatttaccttaatttccattgtctatatgatgcaaattcaactttgatatttgtgttaaaaagatattttagataacctgtttacagttacacagtcattatttgaatttctgcgtagaaaacttcaacgcgtgagttttgcacaataattaacatacatatacttttatcgtacgtcccatctcatttttctctaaaaccttttttttcatcaaatttatagttttctcactcttcttttatttttctcttttatctctcttattttcactcgtacacctaaaaatggagtaatatgtttatctctactctaacgcatgcatatttttttacatgacttgaggattttagtattacgtatatattatgataaaataactaaagattgataatctggatagaaaaacttcacacgtctctactctctcgagtaaatggctaaataactaaatccgtccacaaaaatgtaatgtgtagataaattgattgttgatagatgaaaaatataaatttaattttttaatatactttgtaataaattaatattataaataaataaaaattattttctaaattttataatttaatgtcaaattatttttaaaaaatattatttattattaaattagtctttgaacattataacttaatgataaaattgtctcacaaaataatatgattaatttgtcacactttttaaatttttaaaaactaaatttatatttttcatgtgatcaattttttatttcatctcactttcaagacaaattttactctttattcccctataaataatttccaattgtttatcacttttcatcagcacaagctgaggcatgacttcagtacaaccctccctactcgtgttgctgctgcttggagtggtgaaaattaccactcctgtgctagccaatttgaagccacgcttcttctatgcaatacgaggtgatactatgttatcgttgattggttggtctgtttaaactttaaaataagctatatacaaatatttatatatcttcatttggtctttgtaattgtgtaaattttactttttaatccttacataaaaataatttgttttagtctccatataaattcttttagtttcattttggttccaaccgttaaaaataactttgatatcttaacggttactgacatggtaacaatggaaaactatttatagagagagacatgccaaattttcttgcatgtcaagtttatcaatcttaattaattttgttgttttattttatgcataatattaaaatcccccaactcgataaaaatgtaattgttggtaagtttaatttgtgtgtctctctttggataaaagcgtttatataaccaaatgttgttaacacaagtgatttgatatttgagttttttcattaagatttggatatcgattcaatttctgacttggacatggataaaaaccggagatatcactttacttaaaaaatttactgacttggtgggagaaagattaaacttcttagttatatatacagaatttttttttttaaaaaaaaactttttatataaatggatattgtaaaataggttgcatttgtatttataaccattacacatgaagcaatggagataagtgggtgggattgagcacttgtacttgctaactcgtttctggtttcaaatgcataaaaattatattcttagcagataaagtatttactactttttatgtgggattattttcctcttaagtagaaattttatggattttgtataaattttagtgatattattatttcaaaatataagtatataccaaacagttaataaaaattatataataaactttattttattaaacatttttttaaaaattatttacgtcactacagcataggcattcaaggtcggttatttggaccatacaaagtcgattttcgaatcgaccttgtctccgactacaacataggcgtacgtttctaaaaataagtaggtgtacatatttcaacgatatggtgtagcccccaagagagaaaaataagagagttattctggtgtttctcctggcctatttcttatatagatatgtgtattctcttatttataagaaagacactgtgtaattattctatttttgtatatttagagagattgtaatgtaatttttcttttttttagatacatgtaattttcttttacttagtaaaaatatttttttaattttatctgtaatttttttcttatacattttgagggttttttcatgttaaaatagagagcaaaaatgttactttattggcactttcatatatctattgtttcaaaaataaattatttaaaaatacattgagagaataatttaaagatattgtatctaatctttatgaagcagtctaaattttaagatattatgtctattcttaattaagtcattctaggagtgctaaaacacaatgggaattgccatcaacaagctaagatcaaacaattcaaatcatacaaataatatggactctacatttaacataaaacttcaagacgttatgtgaaagtacagtatacctctccaccaaccgtcaccaaaaaaattcaaatgaaaagcattgcgataaaatacaatatacttttggacaaattcttttcttttaaaaactcaataccctattatttttaaaatgttaaatgtgaaagtttgggttctttttcagagacatcttggacaaaaagatttccagtaggcaggactacttgaacttacatataaattagactactaatttttcaaattatatatctgaatcaaattggatcaaataacctttttgcacacaaattctcttacacatgcaggaagatgcttccgacagcatgtttgaaaattttgcctcggatcaaaattaagcaagatattcttgggtgggaacttatatatgcttttttttttatacatggagggcccttaaggccgaacttatatgtatgctaatcagtcttaatttgattttgtaaagttgcacccccaagatttgaaaaaacggtatgcgaccgtgcacgaatgaatgcaatttaaaaccttagttgaatgtgccatgcatgtgaagaatatgcacgtatgtcactgttagattaatttaaacaagtacagataaaattatatatgtttaatttttattattttaacgtataaagcgagaagatttaagcacaaagaaaaataaacatatcgtagtcatgcatagataaagccattattaatatataattgacattacaatatatagttgctgaaagggaaattaaagttattccagagaggcatatatagagcttttattttgaagaactattgcaggcaaaggacaaattgtactttccatcttaaaccggtagcttctcatatgaagggtggttggggcttatatattatgaaatggttgtggtagtattcgtaagtgctcatatgtgaatcattacggactgtggggtgctcttgatgatgaaatgaatccagtagtggatttggggggtactgctttgaatgaagacatgatttcagtggttgattttgggggtgctttggatgatgaaatgaattcagtagtggatttggggggtactgctttgaatgaagacatgatttcagtggttgattttgggggtgctttggatgatgaaatgaattcagtagtggatttggggggtactgctttgaatgaagacatgatttcagtggttgattttgggggtgctttggatgatgaaatgaattcagtagtggatttggggggtactgctttgaatgaagacatgatttcagtggttgattttgggggtgctttggatgatggcatgaattcagtggtgatttttgggggtgctctggatgaaggcatgaattcagtggtggattttgggggggctcttgatgaaggcatgaacttagtggtggtgagtggtttctcaagatcatggtctggggcaaactcaaaaaatgatggcttgaaattggctagcactggagtagtgagaaccaccactccaagcaacaggagcaacacgagtgggtgtagtacagaagtcatgtctcagcttggaaatcaaaagtgataataatgagaaactatttataggaagagacaaaggaagtttttttgtctaggtcatcaatcttcagttgttttattaaatatatacataatattaaaaaaaaacatttaatcatgtaagaaatgtggtaggtgcgtgtaatttgtgaatatgttgaggattaacttggaatgaattttttttaccaatttagtgcatttttgtttggattaaaattgggagaattgaaaaatatttttgttccatatgtaataatttttttctttcattaaaatatacagtttaatattaaaatttgtaaactactttttataactttaaaccaaatatagatttaagtaattattttattctcttcgtcacgttctttttcctaaaatgaaacattcttttttcacctttcatattctatgtcacattatttatcttttttatttatataacaaaatatcttggtgtccaagtatctatctttatcatataatttattttacctaatatttttaaagcttaattatcacatgctttaaaaaaaggtttaattatcatctaatgttattaattgacttcgttggttatgatcaattccggcaatgggattattattgtgcaaattaaattgacacacgtttaagctttgtacagaagctataaaataggttatcattaattaaataagataaattttaatgaatgtcttaacatcattggttaaagaattagaaggaaaaaaattattgggatacataaaattatgttatatatctataatttttttttacattttcctatattgttcataataaatactttctctttttaattttctaactaatgcacaaacattaattagtgaaactatcaaataacaagttggtgggctagggattaggagggcgagcaaaagttatcaatactcctatggccataattttaaaatccatattgattggtttgatcgtgaattgataatttggtcgagtcggattagatagaagaatagttatgtagtcaattaggtgcaacctagtgtaacctgctaactaagcaaggttgaaccagtgtcctgatcctgatggggctgaatcattgacccaggttggggtcatgtagcgtttttttgaagaaaaaaattacttcaaacgtcattttatcattaatgactaaaataataaagaaagaaaaggcatgcttgcatttaagtgtctcactccttcgaaaactttaaaagattaatctttggcgtcaacaacatttcctcccaccaccttaaagcttatgaattatgatgttttcttattaatttgtcgtcagtcatgatttcttcattttatgtttcctttttggttgtacatttgattttgttgttgtaatgtgattgttgatttggttttcatattatttgttaaatatgatgtgtttaagcaattatttatgttaactgttttagatacttgatattgtaattttatttatgagtagtaatttttttggattttatggtaagagatgtataaactttttattttttaaatattgacaaataatgtggatcaattagaaacttattagttcgatcgttagtttagtgacatagtattttaatttcatctgatcgatttttaaaatcatggctataggaatctcaatcatacacaaagcttcctgaaggaaaaaataatgaattgttgagatacatgcttaaaggctactagcttaattgaataagttgcaggttattttattttatgaggattactggttttattttccttttggttagttcaagaaacataggggtctcacaaatttagaaatgcaaaattagggagatttgttgcattgtgaagaaaacacgcacttagagagctcatgcaaatagtgcagccggttttgttgctgcttgttagttacccacatcttctctttctaactcaaaatggtatatacatcttgtgtatgtgagagttttttttataagtaggaattaaagattttataaaaaattataataattaatgaattctgtttaattaattgaattagaattctttctaagattattattaataaaattatatttattttataagaaaactaataaacaattttttatatgagaaaatcatcatcatagaatgataaactctctttaaatatttaacacaaattatatatgcagctacaggtaatattcctatttgaatcatatagaattaatatcaaagtttcaatagcatattatattttttctgtaagtatttaatgtaattatatatataaaattcaaactcaaaattgattaaattaaaataattcgcccgaacaaattcacaccaagtataaataaataatcagttgaatttgcaccatatagatgacgtaactataaataggtgaatgctacccaaggtttatcttaatttattgacagtaaaaaggttgttttaataaagtgtacatatgtgtgtttctctctaaacaaaacgtttaaatggatattgtaaaatagctaggttacacaagttgtccttgtatttttataaccacttaacatgaagcaattgagaaaagtgggagggattgaccacttgtacttcctaagtcctaacacgtctctagtttcaaatacatgaaaataatattaattattagttattaccagataaatactttacggattttgtgtaaatgttagcataatatgcatgtattatttcaaaaaataagtatcaaatataaataacgaattataattttttatatgacaaactttcatttttactaaacaccttatttttaattttttattaacattcctaaaaaaacccgttaatatttatttttcttattagtcgtattaatttataataaaaaatgatgcaaaagtatttaataaaattgttataaagttcatctaacaataatatattattaacatttttcagatatatctgtaatgttgatccttcgacaccatattctttgtcaatatacatcaatcatgaaactaatctacacacataatgagtaggctattcataaaagatttgtgaggatagtgaaactaacccaaacacgttatcatgagtaggaatgtaggatatagacgtcttacgtttaatcggtacgtaatcgcactgtggcacacaacatgtgtgtgagaaatttttgccaaatttctgcttcacttattatatcggataaattaaagaatgcatccaccttcatatctttcattaagggatataaccgcaggattaattttttgccagttttatgttaaacctattatatcgggtaaagtcaataatacttgaaccttcacatcttccatataccgtaagcacttttggatagattaaaaaagacaaaagaaaatgtgtaagtttatttgggggtaaatgacataatcaactttcattttagtctttatatttaacgaaattaaaaaaaaagttccttatattgatgttaattgctcaaattagttcctaactcattcaaataatatttaaatttgattcttaattgagataattattaattaaattttacttaccacttcagattaatcagactccctactaaaaaaataatctccaaagtggagtatgttagatacctccctcgtggatttcagggacggaaaaaataaagaagagaaaaatcttccttttcaacttttaattattttctcttcgtgcattaacaaaagaaaaagaaaaaacacgtcgatggttaatgtggattcgcatccaactttaaattcttttgtctctatcctccctcctagtttcaagcctttcgcatttgggggtgaggaggatccatgagccatggcgcaatgtcgttggacggtgttaagtaacaacgtggaggtagtgaccaatttgagtgagttcatcaatttttggggacttctttttaactttttaaattttgggactagaatatagtgggttataaatttagggaacaatttcacctttactcttgatttggagcaaaaaatggtataaaatatgtaaggacaaatgcaacctcttacacaatttttaaagttctgatagcatttttatacaatttaggctaaattatatatttagtcttttatcttaatttgatttcttatcttttaaaaaaattaaattagtactttatagtttaaatttagatttttttttatcaatttagaattaacatttgttaattattttaacataatcatagttaaaaaacaccatacagttactagacgtgttttcacacatgcgaagaactttaaaaattctgtgctcattttctctcttacggtttcataaatcttaaaattaattgaggagttttgccgccgtgtgtttcaatcaatataattaaaaatcaaatgatttcattaaagtatgtgtaaaaattaaatattttcatgccgcaaattttaagtgtatcttatactttcatattatgaatggtatcgttcttctagatatctatttcgtaactaaaatattatacttttgaaatgtctatttcgtaatacattcaaaagtaattaaaagtatatattcctaaacaccttaggatagttattattcatccataacacctattccataaccaaagtatcgtacttttgggatatcaatataagtattctaaaataccatacagataggtgtaattctttaataacacttattctataactaaaatatcaaacttctagaaaagtctattttgtaatttattaaaaaataattacgcaacaagccatcaaaaataaacaatgaggggtattttagaagtgatacctaaatttttagtgagaagggagtgtaggataagtttttcgggtgccggaggataaggcctacctattatcataggttacaatttgtatttgatccactttaggctgatccgcattaggcccataaccccttttggacagaccagttttaatatttctttaatttacatgtactgatatatagttcttaaattagtttctattctttgtcacaggactataaagttttttttttattattattattgacattattatttaatcactgtgttatttaaataattataccattatacttttcgtttaatgaatagttaaaatagtcttattcatctggtcactgtttatgaaaatgaaataacttttatatttaatttctttcttttgtagtcatgcagttatctttcttaatttatttgaatttttgcatcaaatcaaattaataattttaattagttatccagtcaaagaaaaagttagttttcttaattatttattcaatactcacattccttaatttacatcaagtataatgagatgtttgactttgtaaattattattattatttgacgatcattattattatttgttacaaatatatcattaattaaattaacttttaagatattttttaaaaaaagttagatgcattttttgcatttctaatttattatttttactactaatctacatatatattaaaactatccaacaccttggcatgtgttggtgctgacagtgctaacctatttttctttcttttacttttttttttcttattctgattgttaacccacacctagttactaataaagcaataagtcaacttttttttttcatgaatgaggagaaaactgtgtaatatgaattttcaagtagccgtaaaaccggtaaaagacacattaaagaaaatcagttggaaagagtcacctaacattattccgcttcaattcccgcactgacaattatcgatgggaattctctgcaatcacatttttgtgactgcttcaaattctggccataaaaattaaattatacattaaatataaaaacaaaatataacttgaaaaattttggtccgttagatgaagactgcataccctgcactgcagttgaaaagggtccgacaattatccgaacagatcttatcgtgcaacagaagcaggcgaaatccaataacaaattactgcaacagtagtattcacaaattcaaattttcgtgtccgtttatatattttttatcactattttttcccagaaggaagttgcatcaaaaccaaaagtaccaaaagcaaaacaaatccgtattttggctacaaacccaaacctaagagagaagattccataggacaattttgtgcctgctgctaaatctcttctttttcacctttgttcctctcctccaagaactcagatcactaccaccagcaacttccccgagtgttgtttttcactttttcttctcaaaatccactctcttcgccagatcttgcttccagtcgttccaggtgcgcgcttctctttctcccctcttctgttatcttttacggtttttagaattcagttttatatattaccctgccatttgcattaatttaattttcgtttggtgttctccgtatttcatgaaaatgtcacatgttttcttaatagtggagcattttggggatatcccctccctggttgcttatacgtcgcttgcggtgattattaggagaaaagcacgtgtgtgtttttcttgcttattgtttattttatttttccaacaatttggggtgtgtgaatgaaaatgcctctataataggagattcaagttgactaactgttgaaattctgggttatatgagaaaaggaaaaattgatgcgactgacgtgtttagattgtgacaaaatgcatccacatgatttataacaaattatgaagctgtttgaatctattttctcattaaggaacataactccttacttacggttctaaacttaacaaatccctgcacaattaatgtaggtcacgtagtactaatgtagtaagactaaaacagtaatagttttgatttctaacgcttcccttcaagttgatgctcactaagatcttcgtctgttacaaataagcacaccaaaagacaatcataaaaatttaatgttttctctatcatgaatagtgctgaagagaggcaggaaagacatcatagcaaacacttgacaggtctgaagagaaacaacaaaacatgatgactgggggttgttgacacttggcagtctgaagagctggtcagaatgttgcatggccaaggaggaagggaaactgatggaaagaggtgctgcagaaatttcttgacaaacaattatacacttcaaggcataagctctccaaattaattagaaacaacattgggaagctcttcatacttcaagaattctagagattcaaaattcaaaaaccttgaatactaaatatggcttgaaaacagctcgtggttggaagagaacacaccccagttgtagggaagcatagccaacaggggtaaaataagtttgcatttaaggcagccccaaagaggccacaactaaggtgggccagagatgactgtaattaaggcagtttttcaacactcctcctcatgttcagggataccggcctggagcatagcaaatgcaagtggcccaacaatagatctaggataggctctggcccaacaatatttttatttctctgatgtttgaataatacagctactgatatatacacaaagaggaatagaaatctgctgtgatgaggaaacaaatcaggaagcaatgaatagcctatctaataataattcagattttattcaaatctgattctaaacacatttattacaaaatattttttatctcatacaatggtgtattttcctcctcttttttttttttttggaaccattttcttgttccattattaacatgtttagttgttctttgtactttgtacagggactgttttcttataacaagtatctttgcttcttataaggagggtacatgccactggctgactagcgaagaagaacaacccttgtgtatcgttttatgagcatacaattggaaaaccttggatataatggggatcagttctcgaaggtctaatcttcagagatggctaactttgtttatgctgtttttttattaagaaaaattttatctgctatttaacatcagaaagtctgatcgattgacatttgcatcttgttggctgcagttctaccaatagaaaaccaagtgatagtatgaggcttattgtgacaacttttgttggaatagtttttggcttctttataggagtatcatttccatcattgactacaaaggtgctgacttttagcatcttcttgttaggcataccttgtgccttggcaattggtgataaaatgttgttggacttaataatggaactctaatggtgctttaacaatttgcagttgaatctcccatccggcctgcttcccgccattgatatttcttaccttcaagagaaatatgcaggtgtcaatgcaccgtcttttgtgaagaataataacagcatctcatcaaagcatcaattaataaatgatacattgaaggtacacatctcatgtcagccttgtgaacgatattaaagttgctggattcaagttaatttctgtataacttctttcattgagaaggaaaaagatttaatggaataatatagttggaagaggtttcataatctcatcaaagattcatgcacattatttgttgaatgaaggatggtaaagaaagtgggatgagtaagtgggccagatgaatgaagtatattttatcaattgatgttagtttacaattttaaggttttaagaaccatgctttaatgggttgtagtggataggcccttaagattaagtagatggaaacttgagtttttgaggaaatgaggtgctggagttattcatttctgttgttagtcttctgcttcccttttatttatttattttttccaaaggaaatactgctgtagtaacaaactagagtaaaattggctggctttcttttacctagatcttcctttcagtttcagtcatgcaacagttctgagcctaaatttatcatcaagcattgagtaattttattaaattcataaattgtaaagctctctgtctctctctcttgtttttacacacacaaactatttcaccatcaacaatctagagaagttgaaatgtagaaaccaaaattccttatgaacagaaacagggtgcttttattaattgataaaatattgactcaaatgtaaggaagagagtaagaaattactgctagggtgatgttaaaaaattggaaaaataaaataagatcaagcacatagcaacaatcagaatcagaaagactcatgcttcttttgttaacagcttttgagtatgattttgtttacttaatattgggaaaatggtttgttaaaggctcaataacaattgctgcatattttcttgattctctgcattgcagatatgggttccatcaaatccaagaggtgcagaaagattacctcctgagattattgaagctgagacagacttatatttgcgtagattgtggggtcagcccagtgaggtgtgtatcctaaaacaattttgttatttcttttttttttttcattctatttttgggagcatctgggggttgaaacatagaaaacatgttctttttgcatgcatagaaaaatacatctaaatacaaattatggtcctgctaatgttgttaataaacttgttaaagaagacttacatgctttcatcagattctttgtttcgatgaaataaactaaatataacaccccaaatccatgagggcgagccctggcacagcggtaaagttgtgtcttggtgacctgttggtcatgggttcgaatccggaaacagcctctttgcatatgcaagggtaaggctgcgtacaatatccctcccccttacccgcgcatagcgtggagcctccgggcaatggggttacgtggcttttttttataacaccccaaatccaagattgatataatttgggaaaggatagtgacatagaaaacttatgttgcttgccacgtgcattttttcttctagcttgatttttttttctgtttgtgttattaggccaatctgtaaatttttggactggagaggcctctgatgtttttattgtggtatatcatcgatatacagagtatttgattaagttgctgcttgcaggatttaacatcaaagccaaagtaccttgtgactttcactgttggttataatcagagatataacattgatgcaaatgtgaaaaaggtcatctcttagtttctttttctttctgatgcataagcttgtgtatgactgcatgggtctttaaactagctccattacttgtaacagttctcagagaactttacaatagttctatttcattatgatggccaaacaactgaatgggatgagtttgagtggtcaaagcgggcaattcatgtgagtgtccgcaaacagaccaaatggtaagaatccattgcgctcgatcttggatgacaaattttccttgcaacttttaccattattattgtttgcctaactaaaatcaaaagtgttctgctaattcatctatgttatgatattaagcatttaattgttttccctcctaggtggtatgccaagcggtttctgcatcctgacattctggcaccatatgactatatttttatatgggatgaagacctgggtgttgaacattttaatgcagaagagtgagtatttattatgatacaatacacagtttaattttgatatccatgtaaagttttacactatcatccaattatttgataattcctcattacaagattttgacttttaagttagtttgtcatcatctaacttgtccaatgtggtaatacaagatgtgattagatgatagtgttagaaacttccataattgatagtggatcaaaataaataaataaaatgtatatttatatacgtaaggattttttttttaattttactcatgaagtttgatatgctctaatttcaatcacagatacttaaaactggtgaagaagcatgggttggagatttcacagcctggtttggaacctaataaaggattgacatggcaaatgacaaagagaagaggtgatcgtgaagttcacaagtaagacaataatccagtgttagttttcttctggtacttattttgttaaagaatgtgtactaactgtttatttttgtgatttctattagagaaacagaggagaaaccaggatggtgcagtgacccccatctgcctccttgtgcagcgtaagtatcagttgaagcattatttttgtcttatcaacccataccaaactgtatcgaattatgttatgcatgcagatttgttgagattatggctccagtgttttcacgagatgcttggcgttgtgtgtggcatatgattcaggttaaatgtttactctttattcttttttaaatatccattggttagttgtttaatgtctgtttatgcactcgttagagtctaacaattaattatgattgtaccattctgggcatttcagaatgatttggtccatggctggggccttgattttgctcttagaaaatgtgttgaggtgagtttgtggtctcattacttaaattcatctaatttcaattttttaattgcaattgctatgctatagaacattaaactaatatctctcactatcatgtagcctgcccatgagaaaattggagttgttgattctcagtggattattcatcaaagtgttccctcactagggaatcaggtaatttgttttccatgattattaatgttagatttaaatagttttactcatattgccgatgtaagatatgatgtttttctttactttgtagggagaatcacaatctgggaaagcgccatggcaaggggtatgttaatgttatgcatgtttcatacagtttgattcgtctctcaaaaattcatatatacaagttttctatgctgtaccgaaccatgaataggcctatatataacatttttcttgcatagttgtttaacattataactcttgatttaatttatcgagaagctgtattacaatggatggagctgttagtttatgcaaatactttgactactaaatatgcatgtctgttgatgaaccatgcatggtgttggtggcaggtgagggagaggtgtaaaagggagtggacaatgttccagagtcggttggcaaatgcagaagacgcatattacaaggccgtgggagttgatatgtttaactcgactactccttagtggggacaacgacggaagttgacttgtacacagccatcaccatagttcgattttgcatgatgtataattttattttatttttgttacttaagtttgtggcactagttacttgcacttataattgagagtcctagctaaggacaaaacaacagttcaatgtgggattccagtgctgatagagaattagataatatataggtaaataaaacttactgtgtaagtagtgtatttgattataatattctttgaggaccttgcaggaaatatgaatgcaatgccaggtataaacaatttggatgtgacaaggaagccatatacctattggaacggcttcacatcttcgttaaacctctaacaaatcaagttgaaaaaatatattatcaaattagaagtaaaacagaatggaaaaaattaaaatgaaaagataaaaaaaattaatagaaaagatgtgttatttaaatggatagaaataaatgaaaaagtggaaatttttctttttcttatttagattagtgaaaataaataaattgtatacaaattatattaattaaaaaattaaattttttattttataattcttttctaaacatagaattattattttgcaataaaaagttatttattaaaagccaaaataaaaaaggtaatgtaaataattgagtctaattattatgtataataaagcataaaagttttgatattgtcaattaataaaaaaattatgataaatatgattcttaaggtaaatgtaaaagttaaaaagcttatcataaataataatttataattagataaaactgtaaaattctattgccaacttttgatgacaacctagaagttttctcatataccagagtgaacaagtaaatcttctttttcatttttttctcaaataaataattaaaaattgatatttctattccattttttttctctgttttattctcaaatgagtcgccaagtgcttttccactatttcgtgtggaatttgaacagaaaatagtattctaccttttcttgtgattgttgtggccatggattattcttttgggtgtggtgtgatttcctggtgtgtgcctttttgaatcattattagttaatatttatttctcaattcaactaacttgttacattatggtaggtgacaagtcaacgaggttccttgaatggtacttttctttgcttcaatggtcctccaagtttgccaatattaaggaggcagatttctcaatcacgtgttggcgcacattttagctgcctttgcaatgtaaccacaccctgctttccttgaaagatttctcaaacaagcacttggaaataacgtagatatcgtcacaacggaacttctataagaaaaactatacacgtcgattattaaaaaaaaaaaaaaaaactatacacgtcataagctagacatgaaaataagaaacagcatataccctcaaatgtggctttcgtgtttctgctgtctcatattttagtggattatcaaaaaatactgtatacaatagtatatgtaagagaagcccattgtgaaaaagaaaaaaaaaaaagtcctctccatcaacaattgtactcaaaattaatatataagggttgacgtaattaatatatgtatgtatatgaatatattttaaaaaatatgatggatgattagttaagttttattaacaatctggtaatgttgacataatttattcaagtcgttaagttttattcttatgatttaatggattggttgaatttatacatgaataaattagatgattagagataaacagtagcaatcgccatccgaagttgtacgaatacaatgttaccttttgtaaagttgaaaaagactagaaatcgggttgaaaaaaatgattaaccagttgaatttgttcgtggaattcctgatggtactttttttttaatgtagttcctgatgtcactaaacatttttacccgataaaaatgtaatacaatctctatctatatcttatatataactgtaatacaacctttttaatacatttttcatattggatgaaattcatatagaactcacaaatttagtagttatttaggaaggctattgtaaatttcacttaataataacaaatatcgtcttgaaaaaattgtgagttgatacctcaagggagaggatccatcaacaccaacggatctatatggccatgaggatgggtagatgcacctctcatttcaatgaaatcattagtatttgtcctaaaatattatattttatatttagtaattttatatttgtacctcttaattttatgtatttgaatctctttaccaagttcacatataaaaataagtaaatgtaccctcttatttaataaatattaatatttatcttaaaatattatattttgtacctcttatatttgtatctgaatctaactattctataatataatgataattataaatttttattttttaaataaattacacccactgactcagggtcttagttctgccactttacagcaaggtttaagtatatttcttattagaaagaaagtgcacttagttttttaattgctaagctctaagctgtagatatatatccttttgtcaaagaaaccgcttaagttacttgcggaggttatttgggcggaaagcacatgcgttacttagtaacggttcagcagtttcaaccttgtgttatttcttgggtcacacttataaggcgtgctttctaggtgttcagactttcccaattgtcactttatatgttggaaaaaactatctcgtgatgatattttacttttccacttggattgtggaagtggaacgaacaccttcattgtggaagcataactaatttcatttgttaatcccactatataaatatttggggtgttattttccaaagtatgatctctttctctcatagcatgtatgtgtgtgttttccttttgttcttctgaatggtaatctggttccatttattaaaccatttagctttcttctttcgactttaaacagggctctattcatttaattagcatctcagtttcttatatggaggaaacaatcagaaaagcttggatataatggtgaaagctactcgcaggtataatatttggcgatagatacttcgtgttgattattatgtttgttcttaagaaattttgtatatgctataatttaagtccacaaatcccttaaactaacataattttgcattttgttgcctgcaatcttactattaggaaaccgaatgaaagtatgaggcatattgtgttactttttgttggaggattttttggcttaattgtaggattatcacttccaccactctcaataacaaaggtgcagagattgaacatcttattcctggtgtaccttatgcttgagagcatatttcatatttattcatgtagttgatgttatttaactttataatggaactctaatggtgcttaacaatttgcagctgaatctaccatacggcctgcttcatctctcttgtgtacaggaaaaatatatagatagcagcaccgcatcccaagatcagtttccaagtgatgcaacaaaggtatgcatctcttcttgtcatccatgagaaggacttgaaaattgtagggtgtacagtgattcaagaaagttaggggaaaaacatattttattcaattatatagttggagtaaaacccataaagtcaagaaaggttcagcagcttataattgagcatcatgcttcaaaagtgattgactttaatttggaaggaattagagattagagatgtttactcccatttagagcttaagtatgatcattaaacactgttattgaaagcagaatgccttgtgaacagaaacagcgttggttaataattgatcaaatcaaatgattgtcagaatatatatggaagaaaacaagatattattagaattttatgtggttatctgacaagagtgaaaaggaaaattaaatatagcagcgtgagatccataaagcctcttgcctcttcttttcctctccatcctcttcttatttgttaatcaattataaaacataattgtcaaaggatttaaccatgatttcacattatgtaatatttgaaaatatgacatgttaaggtctgtatatatgatgataagacatttgctacttgttttcatgattgtctgcagatttgggttccaacaaatccaagaggtgcagaaagattacctcctgggatagtcaatgcagaatcagacttatttttgcgcagattatggggtcttcccagtgaggtgaagtctactacgagagtttatttatgtgctcaatgtagctacacccttcgaatgtaataagaaaaatgcagctaaacacagattaatgtgctgttaaacattatgctaaggttatttaaagagaaaaaggatcatgcactgaaaatgtaaaaagttctatacaatcatccaatcgcaatccaccatatattgtaagtatattgacttttaaattaattatttaagtaattcaaactataatttatgattaaatgacaatgtcagtgcatagacattaaactcttattaaaagtaacaaaaaatttagcttgccacatgtgatatttttctttctagcattattttctgttttttctttattctgttctttatttacttggactaggagtgcctccgatatttttgttgtgtgaggttctccatatacagagagtttgataaaatttccacttgcaggatttaacctttaagccaaagtatcttgtgactttcactgttgggtatgagcagaaaaagaatatcgatgcagctgtgaaaaaggttctctccctttctcttcctatctttctctgcataggtttttggacgcgtgtttaaactagatatgccacttgaacagttttcaaaggacttcacaatcctcctctttcattatgatggccgaacaacggaatgggatgaatttgagtggtcaaaacaggccattcatgtcagtgttcacaaacaaaccaaatggtaaaaattctatgcttaaattttcatgatggcatattttcagttaatattgtttaccaaactttaaatggtttgttatttctttttcctcttaggtggtatgccaagaggtttctacatccagacattgtggcaccatatgactatattttcatgtgggatgaagacctgggggttgagaatttcaatgctgaagagtgagtcttagatatatgatgtatgtgtattttctttaatttttgcttgttaaggaagtttcacttccccactaattccaatcgcagatacctaaaactggtgagaaagcatggcttggagatatcacaacctgccttggaacctagtaaaagtaccaaagcggtgtgttggaatatgacaaggagaagagagcatagtgaaattcacaagtaagagaactacttttcttgtgctgtgttttaatgtgagtgtgttgactgggtatttctttgatttcgactagagaagcaaaggaaccaggaaagtgtaagtaccctcttctgcctccttgtgcagcgtaagtaactgttaaagaattttttattttattttttttttgggaggggggttacaatattttcccatctttaattagctgattccaccattctgtaacatgcaggtttgttgagattatggctccagtgttttcacgaaatgcatggcgctgtgtgtggcatatgattcaggttcaatggttactctattgattttttttcaaatatctcattagttattgagaacaattcttgtatgagcacttcatacctcataaaaatatcagcatgacattgaaataattttagattgttattttaacgtgttttgagattttgatttggttgtgtctagtaaccaattgctcatacttaattgttaatggtttccaaaataagttatgattgtaacacactgctcattgcagaatgaatttgtccatggatggggtcttgattttgcctttagaaaatgtgttgaggtaagcctattacctgatattacttcctatggaactgatatgctatatggaatattaaactgatacttcctatgttatagcctgcccatgagaagattggagttgttgatgctcagtggattgtgcaccaaggtattccctcactagggaatcaggtaattatttttccattatcattattcctattatgtttaatttaattctaattatttcactcaaatgcaactgtatatataatatttatttgtttttgttatcctgtgtggttggtagggagaagcacaaacaactgaaaaaccggcatggcgagcggtaagttatgtatctttcatataatgaagatcattagcacatcctttttaacgtattttttattattgattaaaatttattaaaatctacaaaatcaaaagacccattaaatgaaggatgggacaacctacaaaattatacctaatttctaataaatttgagttgtaaagaatgtgttgctaatattattcttttagtagttgtttaggatcctctttcttgaccacatagctttttgcttctttttttttctcacattagaaactgttacctacattgatcaagaagcagtgtaataatgttttgtttttcttaatgggctttgattcttaaatatgtggtattggtggcaggtgaaggagaggtgtggcatggagtggaggatgttccagggtaggttgactaacgcggaaaagggatattacaagtccaaaggaattgatttttctaatttgctcgttcataattagggggacaccaccaaattcttatacatacatcgccaccgttgtttatgttttcgagatgattattttgacatatattgttttattaatcttgtaagataaagtttggataaattattcaataaacagaagaagacaaaagcaattaagataaacgaaggatttatttaaaaaaaacaaagattttttttacacaattaactaatcgtaaattgttaacttgtctattacaaaatctttcttcttttttttttccggaaatatccaatacaaaatcttgtgcttaggttatatggacttttctattcttttcgtgtggatacatttaagccatcaacaacacatcatgtttatgtccggggaaatttctagattcatttcccaactcccatggttgctgtgggctgtgacaaatgattcatttatttatttatcatttctaccattattatcaataagttcaaatactataactttatgttcgattacaagccagccatattccttgaataaaaattttcttttcttcaatgatactccatctttgaacatattaaaagatggattttttaaatagaatgatgacgcagaaagttcgcaataacactttgctttcctttccttgaacgattttaagcaataaaagaaagtacaatatagtccacaaagaaaagtactaaatatttaattcaactatttatccaagcaagtgttgtaattcagtgggtattccgtattccaaaggcaagagtcttacattatctagttatacattatttatttatttgtttatgtttcaatttgtttttaagaattttaaagtggccagtaaaagtacgggactcccatatattaatttgggccttgtggggcttgatgtaatgcgataatatgcctcacatagaacatctttatctaaaaacaattcacttttccaaaactcctcttctcccttcctttgttcttgggttgaaaaattactcttgccagcaagttcagattttaatatatattgtgcaattactataactgatgcagatggcatcataacatattgcatggttagggatctacgagaaaaataacatatcataaacaacacgtatgaatatgttagagaacactgtttccttaaaatatatttcgaaatctgaagactggtaaaaaaaaaaaaactgaagattggcgtatttcggtctaatgataccaaacatgataaactaattaaaatctaaacactgaacatatatacattctgttgagctgaaattttcaaacaggtcctaattaattatttagaaccaattgtacttggaatttatttagaacacaattttatataacgtatcattgcttgttttgcattctttctacataacatgtactgaaatagggggaaatctatagcaacaacccattatcactataagaaaattgaaaggagaggactgaaacaaatacaacacgccatatgagtgtgaggccttggtgcatttatttaggtgaaataaaaagaaaaaaacagtaaaacccctgagtagtagtacttcagttgtagattatttatgatttatgatatgagatgtgggtaatatggctacgagtcaatttgatgccattttaaaaggggagctacaaaaattgagggatgaattattcgtaaaactttattataaaagtctcaccccaaaatcttttaaccattttaagggtaccccaaattaaccatacacaatatgtaacaatgcacataatgcccctatgatataataatagaaatagctatttatatacaacagaggctcatcaggcaccccttgttgacatgagcctggctaattccatcctcgtatgctcagactgaataaatgcctcagcttcttggtccacacttttgtaagcactatgattccataacctggtactttcgtaaccttgttcacgagcctcaacgttggattctacttcggctatagagtcctgctcatagttggttctgaatgccatatgacccttcttgtgatgatgatgcctaggactatgatatgtagcctccactggggggtcgtacacttggtactcgtcagaggggaatcgccaccctttgttgttgttcctattgtagttttggtatgccatttctaattataactttgagggtgttgagctaggttgtggtgttgcttcatcttaatttcagctaatatttatagtttttattattccatgatgataagaaagaatttaattcttctctctcttcggcatgcaaaaggatattcggaggaggagatttatttgatatttgtgcatggagctagcatccaattcggtatttttcttattgttcaaagattccaacgccaccatcatttaaccaactttaatttgttcctagatagcgcaactcggatgaaattcgattcgtacaaaagtttatatatatatatatatatatatatatatatatatatatatatatatatatatatatatcccgctttcatgtgcaatttggaattttattttagtggcatgaccaacacttcagaaactgacgtctgtaatagttcattatttattaacaccttgcagatctaagttaattataaattgaaacaaaatagttattcaatgtccacagtcatgtatctctctggttatattccttataattttttttgaaaagatagagtgggataaaaaagaagctaagaaaaagagttttaatctcaatattttactttaaaaaaaactgaaaagaaaataaaaagtgtatatataaaacatagtaaaaacgtgtagagataagatctcatgcaattgtataataattggagatgctcctaatctatagaggacgacttaacaacgtcaaaaaaaaggatgacttaattaaaaaataataatgaaaggataaaataattttttactaactgtaaatatataaaagtaaatagtctttcacttttttgaaaatgtggaaagttgatcagtttgatgtatttcgttaattattgaatttttattaagcagtcaaggatcaaagcctataatcacaaggcaacaaagttatctatgaatcatgaatgtaattttcttttaaagtcatattagaacgtcactattaatctccatttctatattcaccacgaaaggagtggaagaaaaaaagttaaatttgattcctaatttgcggaggaaattaaatggcatattaatattccttttctcaactacaaagcatttgggttggacccgtaattggttaatcttcttgttagcttttgtgttgggccttaacccctccttagttctgaaaaatatattcaaaagtgttgcacctaaatggactagtaaaagccagattaaactagttggtttgaccagttggacaattggtccctcatctggccagaatgacccttggaattagtcctcataaaactagccaaataatcagtgaactagtcaatgaatgtgaaaattgaccagaactggggttcatcaattttattcttctatccaaattccaaagtaaaaccttttcctaaactctgatagaggcaagcttttaggttcctttagaggataatggaggataaatgctagtggacgttggctaagtgacatgagtcatatgttgaccaaagaaatcaatgaagaatgaaagaggttttatgggaatgggaggaagaagatttcagtagctgaatcatgttgtgtgtgaatgttgtagagcttatggttcccaagatctaagagtgattgaatgtcctatattcttagggatcgaagaatgcctatttgggcttcatattaaggagctcggaagaatagacaatggttggatcactattgaatccttcactaattgtctaattcaatagctagtctagttttataaacatggcttaaatcaatagttaacctattaattataacttctattcgtataacaaactcattacctttttggtacatttgtttcttttttttggtacaacaaactcattatttaattataaattatattaatgaaataaatataattaattttctcttataatatgagttaaagaactcatcttagaaagtgaaattgtcaccctccccactctcaatcaaacatacttaatattcgctttttcccttctttagaaaattgtaataggaaacttaccatcgaccctatataaaatgaaaagaaccctaagggaaactgaaccaatatcaagtccgacacgatttggttttcaacaaaagaacttcattgatgatacatgcacatgtcttattgttaactggttaaaattagtctaatagaaggactttagaattagaagataacatgaataagcgctaaatcacaagctatctaaaccatcgtctaacgaaagacctcagtaaatagcacatccccacgctttattgcatattgtctaaatcagtcaaataattttatagagcaaaatcaatgttggcagattccaacagattccaaataggaaattaccattctacagagggaaacggaaataagataaaataaagcaacatatgtcgcgcccgattaatatcacatattggaacggcatccaattgaaagtaaccaaactaaatttatgtaatgcaaagaactgagtcagcactgttatgaatatagaccaaccccaatcggattagatatttagcataaataaagaataataagaaaataaattggtctgcagaacaaaacttcccaaacaggaaaaagtggggaattttaaactactctcgtatatcggggatcaatcacactaataccaaataaacacatttcatgaaggcaaacccgttctcaaaacagcagtttcagtcctcataagtagagatgttgctccccttgaatgaaactccagctctaaattatatacagaactccccctagatcaaagaatttatctgaaattaaataattcccaaagaatatctcactggacaatgatacagctatacgagtgacacacaatcatcacaacctcagttaaaaacctccgagagaggagagtcacttgagctgtacaagctacaagctcagaaacaatgcagtatcataaatgactttcctagatcatctctctctcttgcaatttccaggtaaaagaaatttatacttctcagaattttccagaagaaaagcaggaagatgaactgcagaataggaatggggtattggtcccattttaccaatgatatccctgaaagtgtactcctccggcagcatatcaaataaatcggtccctttgcagattaccttctgaattctttcaggatttaaatagtgagagaacctgactctatcataatggctgtaggctttcatcttgaaaatgaaatcatggatttggcggaagcaaaagctacaatgccagccagcatctgccaatatgtcatcagactggcgataatgtgcatacctcgtcttaccagtctcatacctgtgaattgaagccctccagctcttatcatccacatgaaattcaaatgaatagagataatttttcagctgcagatgaaggattgagggtacttcatcacaccacctcaggaggttaatagtgtgagcacttggtatctcatccacatcagacataatcaacaagtcatcatcagtaataccagctatcttcaggagctggtccaatgctacacgctgatatgcctcttcaacaaatgggttttctcctttcttaaatctcccaccaatggtcccataagttaaccgcggctcaacaaatttgaactgctccctgttgctactgaaaaccagaggcttaggcaatccggtgaaggtggaatttgactcaaggacaacaaattcagttatgtaagggtacaattctttccagcgcaaggttagtatttccaactcattgctaaacaacacagcatcataaacacgtcgagggtactcccggactccccatccatgaagcctgcaaagattctccatggtgacattttcgttatagtaatgagggatgacattgaaaggcttgggtgctttttcccatagtggccgcagaaagtaggagatcttttgcccatgtatatagaatccaaagacacacattgggataatagcaaacatgaatatataggttttcacatccagaccacgcagaatgcagcgaattcgtgacatgcctgatactttacttgattcctgcaaaattaaggaacaaacatataagtaaactgtaaaaatccagcttcaagaatgaaaaatcatgaaataaatatcatatgcagcttcattaaatcatacacaatcttatcaaaaacccaatgctcctctctctattgatgaaaattttcaagcatcatataacttaaatccccaattgtaatcataaagccaaaagctgtatcatgaagaaaaaagaaaccatgcccccaaaaaaccccaaattgcaagctcttcatgcgagaaaccttgcacccattcaaatccaattatggctacaacataaacgaaacccctttccctcccaaatgaatcccccaaaaaataggaacaagaaggaaagaaaaaaaaaaaggtgtcttcgtttgcgttcacttacaagccaaaaaaaatagctcagcgggtttcctaaaattagagaaaataataataataataataataacaacataaaaaacgcaaccttatcccatacctaaattcagatctcgaaaatctcgttcacacaccaaaaaaaaaattaaaaatagcacacaacaaacaacacctaaaaagagcaaatctaggacaaaagtttcatcacaatccagtgatagattacatgacaaaccacatcaacagttttctatggaaaaaccattcaaaatgactttttttttcctccaaaataacgaaatccacaaattaaataggcgaagccacagctgaaagattaacttacatcgacaccacataaacggaaaagtaacatttaataaaaaaatattatggatgatatacctgaccacagacattggagcacaaatcatcgctcttcttagaacagtaattgcctccagtctcgctcatcatccaccacatttcggcgtgtctttcacagtccaacgtacgaatgaatcaaaacaaaaccagatcgtgaacacaaagtcgcaaaacgaatcggcgtttgaaattttagtgttaagcaaagaaacacgttgtcgttaaaacacagcagaggaaacaaaatccgaggtggtttatatgtttattcacacgaagagagtataggacggaacaaacaacgaggaaaagtaattagtaaatagcctctctgtatgttggaatgggtggcagttgtcgtctccacacagctagctatggaactgataaaaaaaaaaaaaagagagagaaaaagttccgttacaagattggtgattccactttctctatcccaatttctttctttataacttaactaataaataaagtcttgacctctacttttactgagtctctcttctccacgcgttgttgtgtgtattgagtattgactcgctcgcgacaactggttcagttctctgctaatacgtgttattatttcatctaatctattacggaaacaagagggtatttattcgcttggcattttcatattttccataccacactacacgtggcagccagcgaatgtgtgcccggttttgcttttttatattcaacacaaaatattcgttacacaaacaaacactttctcagtatccaaaaaaataaaacactttctctgtttcacttcttttttatacattgtttttgttgctacaacttttccaatcatactatttattgttaattattaaaatttatataaaaaaaatacataactcttaatataaagtaaaacttgccaacaaaatcttgttacggacttagttgttggtggtcgtttcttaatgagttgacaggctcaatttacttaaattttattatataaaaaaagaaacctgtaaattatgtaatttttaataattttaataccatcaaccatataggtcttttcttatagatttattgatctcaagactatttttaaaattatttcattacttttaataaaaataattttaattattttataattttcataatgagttgttttaatatatgtgaaataattaaaaaaaaaggcactaagatgtttatctagatgtggtactagaatcctaagttagaaaagacaatcatttaaaaaaaataagattattaattattatcatgaaaaaagtataaaaaaaattaaggacacgaaatttaaatatataaaattgagaaatcaaaatatagatatttaaatatttatatgtaatttttaaaaataagggatgcaaatacatctctttattcatatatgaattgtcatttcatgaatagatttttacatataaaaaataataacttaaatatttttttagttttttgtaatttaacgatttcttacatttagttcctgtaaaattatgtttttgtttttaatttttatagatatatttttctgtttttcattcctgtgatgtttcagatagtttttttattgatcaaattcctatttaaaatgttttaagtactaaaaacaaaaaataattttgcaataattctaaaagaaaaaaatacaaaattgtaagaaaaaataatgaaaaaggtgttatattcgaaactcgaaagaatgaagaaagtatacaagcgacatttgtcttggttacattacacttgatgatcaaaacaaagagtattgttagaggaggttgtaaaagaaagcggcaaaggtcgattttttgttatgttattgtttagtgtgtgctggaacagtccaatacaacactgccaccatgaaggttgtgatgatattaaagatgttttatttgggagcattaagttaagctaactataattaattaatgactaatgacaattatgtatggggaagaggaccacgttaggagtgggcccgtttagcaatgatatggccccccaccacgagcttgtcgccgttggctcgtctcgctagtttttaagcaagcctcccttttttctaataaaattattattattcattatgtctgtttagatataactgtttgatagttttttatgagaaatataaaaaaaaaaaaaatcataacaaaaactctcaaaaattacttttaactttggatggtataacatggacatgttaactaatgtattcttcctttaacccaaacattcacactacaatgctcaacactgggctgagactaactgcctcaacttgtccaaagtcttcttctctagcctcctttccaagagcatgatcgccctccgatttgagttcggtgagcccaccttccacccccacatcactgttgttggagccatcaaaacacccccgacaaagccctcaccaagcttcgatcagcgtgtgaagccctcaggcccttccacattatcgtcaacggcgttgccgttgacaccttcttctactagtgcctctatctcctcctctgccccgaccctcaccttcacgaaactagcgcatactatagggaatctcgatggtgtcattgtctttaagaagcgaggtgaaggttattgcaacggcgaggcaccgatggaaaacaggattaaggacgccgtggatgagaaaggggagcccttggtcttgtaggttagggtttgggtctagagcatggccaaatgcagtcctattcaatacgaattgggacccaatatactgttgccgtcgccagcgacagtgacaatgacaacaacggctgcacctaatcggcgagaaagtcgtgttttctattttaggggttttgattttggatctcaatttgttgtttggattttgggtctgtttgcaagtctgattgaggttgcaagagggagtagaggcgacgaatattaagggattcacagtggtttggaggtaagggcgatttgttgaggtccatggtgtgtctggttgacgatggatttgagattttgcagaggttcagagtgggggtggtttgctacagacatagtatatctttctatagttatcaaacataattcagttgattttttatttattagtgaaaatgagtaatgatctattgattttcagttgatgtgggttcttggtatgattcagttctctctggttgaaagcagaagcaacagcaaaagagtgaagacttttaaagaataacacgtttgtgggtagggatagaaataacccaggtcatctattaggggtctttggtctgacctgtttaaggcctaggtctaacttgtttattataaagatcagacttaggttttttgaaaagtctatttaaataaaaaggtcggattcaagctttacaaaaagcctattaggcctgtcatgctagtttatacatatttttttttacaaacctactacaaagatttcaaatcttttttattttaatatttatttatctatatatatatatatatattaaaactaaaaaatatataaatcaatctttaactgagtttgttgtgattagtgaattttaatctcatattagagtgctttaattaattttaatttttttcacccacaaattaaaagggaagtatgtcaatgtgtgtatttctttatattaaattaaaaaaagtattatgcgaattctcgaagtttcactaatatataatatttattgtaaaatagactttttaataggcttgtaggtcaagtcagatttttaaatagactagaccaagcctaaaaaaaaaaaagcctctaacaggtaaatagattaggcaggcttgatgtttttaaataaggccaaggttaggcctaatcgagcctgtcctatttccattcctatttgtaggggcatggacaagggtataatgggtaataagaattttaattagaagaaaggggggcttgcttagaaattagggaggcttatttagcaagatcttaccatttggtttgcttcgttcgaaagtaggcttgccctcgaaccgccagccaagtcacagtacgctttaaccaaccgacgtcttcttgcaaaaggcccaatactttattattattattatcgagaattaccaatgtgattcccaaaaaatacacaagaatcattgatgcagaatatcttaatcaactgcaaaaaaaaaacaactaaattctatctaaactagaatatctttcctaaattgtatattttttttccttttcattgtcgttttgcaatttggtctccctttgttttaaaaaagagtggccttcacatataatgtttaacgaaaatatttacatatttgtacaataaagtatcacgtcaataaataaattaaaactgctctataaaaagttcatcaacaataaaatattgtcactaaaaataatttaaaaaaaatggagctctattacaagctactaattaccaactaagactcaaaatttaacagttttgtacttgtcacgtgttagaaatcatcttatattttatcgaaaataaatcaacttatttaataatttttaatctcgtgaccatttataattaaataaaaatcaaaaaatatttactaaatcaatatattttaattaaattatgttttaaactacaccctatgtttacttttatccttccaaattgggtaaggatgaaacaacttacaaattatatggatttgtttggcacttgtaaacaaaaatcttattcttgaacttaatacatataggcacgttattgttggtctcatccatgatgtcgatatagaaattaacatgttgagccacttgaatgcgaggctaaaggaaaaaaaatatattaatgagttagaaatataagttttatagacgaaaatattacatcatttgcggtacactcttctcttcttttttaccgattaattgtaacccaactatttattaatagcatatagcttacccagtggattaataactttacagcctttacagcacttgtataatagtattaacggactgcgtattatattccaatatcatccccttcagatatccgacaatgcaaatggcataacaattatacactatacatgtgggaaaccgtggaacgattccacctagcgaattgacaattaacgagtctaccacgatcaatatcggaacaacttactgatttgaatagctctatttacaatatttaaatgatcattgagttggttcaacattgatggtatactttatgagtgaggaaataagcttgatggtatactttatgagtgaggatataagcttccttgtctggggtcaaaggttgtttatccaaaatattctagggttaaaggtttttatccaaaaaaatttagtgtgtaatttgtgttttttaagctagtgttaggattttatttcactttgtgtttcaatacattttttggattttcaactataattttttcatgattttattattatttatgttctttagggatatgattaggagtgaatagattggactatgtcgaatcttatttaagtctgatctgatctactttatacttttataagttaatcttgggtttattatttgtcatggatttgtttttttggtctagtcctaatctctctataagtctaatttaatctattagcttatttaaatgcatgtttcatgttaaaaagtgtaaaaaaaattattgtataataataaaattattaaacgttaaactattaaagtgtgaaccaactatttatatgttatttccatttactttttgtttatttaacaaagttgtaaatttcattaaaaataataaaataattttaaactaaaagatgtgacaaaaacttatctaatgcctataaatattacacatgaatgtcatcaaaactttttaagccccaccaaaaaaaaataatctctatttctgctacccatatatgcatatagcaattaatctataccaaacattaaattcaatcatcaaatcactaaaataattttgtaatttttttgaaataattatgatattatatcatattaataataataatatctttattaaaataatattgttgctaattaggctcaatccatcaagcttaataagttttctttttaagtttatggccttacctatttaattaaaaaaggtttttttaaaagctcgtgacaaaaaataatataaaagggatatattattagttacaagggtatatttatcgatacccattaaacaaaacctttcattttgatggaccattaatatttgtatttaacccatcacgacttacatatgacacttatattctatgcgttcttaattgcatcttgcatcttccatttttaaaaaatccccagcctaccctttctattttctcccccttattccttttctttctcacgcaaactcttctatttgttcttctcttcttcccgcggtgcactcgcttaacagttcttctcttcttctccaaccgaattcttcttccaactctcgacaccataggttctagcgcagaagtccatcccctccttcaactctccacgccaggtacatttcaacatcaccgttgtggacatttttccagagctggctttttggaacggtttttttgttttcaaaataaccattcggaaaaaggttttccaaaacacctattatggaagcaattcctttccaaaaagcttattttggatttttttttttcatccaaaaatgccctgtcaggaacaccttaccaaaagccaaaaaaccattccagaaatcctgttccaaagtgcacttgtttcttctagagtgggcttttcataagcccagtaataccttccaaaacaccctttttgtatatctcattcctaaaatttttgctttcaaaatgaccgttttgtaaaaaggttttctaaaagcttatcctttccagaaagcctgttctagaatgtacttgttgcttccgggaaagactttcttaaataccttttcatgcttatgaaaatgctattctgaaatcattttttggatacggaatggtccttctagctgtttaatagataattaaatttgatttgttattttatagttttagtttgtatggaagatgattacttcaacaaaagatgttggttgaagttgacatggatatgaataataaataaaaaaagttatttttggataagaattaaaacaactacaatgaacattgtaatcattttgagagaagagagtgattgcactaaaatattattgacaacattacaaatcaaaaaaaattaaaggtactaataaaacaagctgtcacaacaaagaaaaatgacaattagagaatgatgtcataaataatatgtgtcttcttttatccagatgaatggaagttattcaaatttgaatccacaaaaaaaaataattgtgagaaataatcttaaataaaatttaaaagaacctgaaaagttttaaaaaatatataaataaatctatttcaagatttaaataatctgttaattagcgttcaagaacagatatttcaaaatggttattccattaaacaaatatagaattgaaacccagtttaagaagcatatcacagagatagttccagtcaaggcgatcatatgccttatttatgtcaatttttaaggcaacatctcctttctcacctccctttttacaatttgaacattaaatggatactaaaatcgtagtatattatattaatttattttatcttatctaatacagtgtgtgaactaggctcttaatgtgattattttaggataagaaccatgtgatgaaaaaaatatattaaaggacaacgtattattaattattatttttattgtaaacggatgtatctttattatgacaatcacgtacaagaggttccatggagctagatgggctccatcgatatgcttttgatggtttgcagatagctccatttcactgtatagaatgggcctacaaatgaacgggctaactagtaagtcacattcctaactccgtggatgctttcgaataaataacggggagccggatatgtatcctcacaaatgtggcttgcatattgatctttgcttaatagatggaaagtgaattcttattaatgccctaataaataacatatcacgcatgttttggctacagttttttgtatttgttatccgtacatttaacatgcttaaaactaatgatggtgtgagtgataacttaacatctttgcttattggaatcttgtgcagtctaattatgattacgaagaatatgtttggtttaaaatttgtaaagtatactttcatttccttctcctttaaactgagtttgaaggtaaaattgaagaaaaactcagtttacagtcagactcgaatctaaatcaaacaaaataatctttcagctgtactttttaacagatgttcaaaactcttaatataaacacaacgcacacacgtctcgtcgccctagcttcttttaggcctcaatagtgttcactgttcaatggccagattctggtatattccgtataacatatccaatcggaccaatcctatatcttgaacacttcgaccacgcccatgaagcatggtccatggaattatggttggtggcactttataatgcctatttatttcataaccatctgaatggtataacaaactagctaacaccagtcatgttgtgctgtgctattgtctttatttttcagctggggtagcctatttatttatgacaatttaaaagatagatacaacctcaccttcaaggcatacggagtagaagggagaaagaaaaattaaaagatgaaaatataattaataatgtgatattacgatagagataaaaagaaaaataagatataaagaaactgataaatgcacgaatgtatagttatttttatttatttatactggttcgttgcatattgcggggttcctgaagttacaactcattttgttaggcttacgttaacaagttggtagtcacaactcacaactcaactcatgttatgccccttctaatcaattaaaaacaagaagatatctttggatctagagtgcacctgcggctcccaatgaaagattcctctcgaatactactacttatcattttcctctatatgtattattttgattgaacacaacacaaggcagcaattcagttccttatcacaaaccttacaataattaaaatcacatgcaatcctaattacaaaaaacctatccccaacccccccgtattcctaattacattgacataaaaatgttaaatcaacctcccggaggaaaagctgagaaagtcacgagaattgagaagccgagcagaaaagcgatccgattcactgacccttaattttatagtttcccttcgcaacttaccctcttctctatacacctgaatccctgctttgtccttaacctctctaaccaaatcccacaatctaagttctcttgccccatccatcatctcttggcactgctccaacctcttcaaacaacaaatcaattccaccgcttccccaaacttaaaccctcccaacctctccttaaactcactcaccctcacgcgcacctcaacttgcaccacgccccaatcctcacgcgccaggttcacaatctcctccactaacctgttcccgttgggctcgggcctcttgcaaatcccttccaccaaagtcaccaaggagtcaaaatcggtcaacaagtccacgttggccagacccgacaccctgtcttcgctgtcggtcgaggttccgaggaagaatcccaggatcctggaagtgcataagagctgctcgatgtgctgcgcgaaccatctgacccaggacgagagttcccatgatgtcgggtcggtgttgtgtcggaagttggagaggttgaggtagtttctgcccccagcggaggggtacacggagagctggtcctggaggatgaagctgccgtggtggatgatgtggtggacggcgatcaggcacttcagggccacggcagcgttgttggtcccctgaagccggtccatcaggacctccacggcggccgaggcggtggcgcgtgagccgtcgcccaaggagaggagcgtggccaggtgcttgcgcgtggggggcgtggaggaatcgtggctcgtggcgcgtaggagggagagcgtggtgcgtttggataacaacgccgccttgctctgcgatgctttgtccttgattatcccaattagatgcgtgagttttgtcatgtttatgtggcgtgcttaaagataaacacatttacacagacactactcgcgcatgaaaatttttatggtggaaaatggaattaaagcccaacccaatctagtcagctgtcttggcttggccctagtgggatatatgattatgaaatgatgttgccttctcagctataatgcccagccagatttttattttatttttatgcgttgttcaaatttgcgcatgttcaatcgagtggttgatgacttgatggctctagaacagtgcatatatacacacttaagttttccattttctttttcttaaccctcgatcgataaatgaatcatcattaatacaaaatttaattagaaaataaatatagtctaattcaaaattaattttaacaaaaattacttgtattcaatcacttaattacttacatacatattatattgaatattaatttttattttttataattaaatttattacttcttttaaacttatatataaacaaaaataactaatatcatatcaattaagaaatttaattgatattatttaattttttaatctcagtaaaaaaataaaattatttttaaaatattttttatcatgaatatttttttatattaaaaatagaattaaaatcatatgaatgatattttaagaatgataatattaaatatgataaaattagttaaaaatttatttatatttaaattaaacatatttattacttatatgtttcgaatatatattttaaatatttatagtcgtctttttttctctttttgataaatggggatagtgattttcttttttaacgggatactttttttttgacatgttttgataggatacttaattattagcactattgtttttttttaggaactagtaagtaaccgtgcataatgtatagataaaaatccagtgcaaaatacttaaaattaatgagttaactacatatacgtgtttggttacctatcatttacacacttagcttatgaattcaaccattctttttaaccgtgttagatcacactagttaaaaacaaataaattaaataataataaattaatgattaatatttatgattattatacttgtaaatgcttttttaagaattataattgcgagtgataattttgaaagtatttgaccaattgttttaattttatgaattaaattaattagaacttagaattttagatgttatcttctcgttttataatttttaggaaacaattaaaacgaacaatattataatttctgaaactaaattgatgattactctacaataatagtactttctaaattaacatcccaaattaaataacttgcttcccaacttcctccagagtttacaggtccataacgggtatatttgccttttattttcttttctatctttccataacttgccatgagtttctggggaaaaaattgccacgagtctaatattatttttttaacaacatttaccatgcagcttcgagaggtcacacagtacgtaatatgttattgtattgctttggtattgaaatttatgacctgttgattttgatattgaaaattggatattggatagtagattaaaaaaatgtaacgaggaaagagaaacagttgaccagtagtttcttgactttcttctaaaaccaatctaataatcgtagacttttaaacggattggaagaataacgattgattgtccatatgctacgtaccaaatatacacaagcagtgccaattgaaagggtcatctgttcaattggattacgttgaaagagttactttaattcaattttattggtattattttatttttatcattgaattaatttgattttaaattttagtaattttattcaattgaagttaaaaatacgatttttttggtattgcatctcattgaatgagtttcactcattaatctatgattttgtattttctaataattttagactaattccataaaaaaaaaaaattagactagtagcaagagagtttattaagttgggatttttggagtatttcaaaaggctcatatcccatattacttagtttaatacttttttctatagtgtttatatatcaatttgttttaaggacttttagacaacaaagtaagaaacaaagacttgcacacatgagattgagttaagtggatatgatgtggtgtaaattgtcatatatgtccctttacgggcacaagaattattttaatttacagattaaaaaattattttcagagtttagttttaattttggtttaagcttaattaccttcaaccaaaaagaaagcatatgcttatcatcacccttgaccctccccaaaacaagcatatacggttatggaattgtaattgatagcaagtaagggtgtacaagaacatacaatgactaatgtttttatcaacgtttttcttcttctttggatacatgttaaaatgtttcaatggacagcgcattcttatatcatttgtgtatgtaggcaattgcttcctgcccctctggctttgcttcctgcatcccataattgcttctatctttggatacatgttagtatgtttcaattagccattccgaattgcattctgggttacatttcgaaaaggctaatactaaatgtaaaattacaatttaaattatactttccagaagattaaaaaggtacagaaaacaaaatggaagtgcaggaagcaattgccgtgtatctactatatagtatatacacaagctgttgaagcccatgcactaatctggtaatgtgaagggccggggaatatataaatttctaagaatggtgcttcatacaccatttaaaaattctacaaggccattaatttttcaaaaacccgaaaatacccctgctgctttggacacttattttagttgagctgagcaccatttttgcttcttgtttgttgttgatttttggttcgcctcagttgcatttgagaagcattggtgatttttggtgccattttggttcatttggttggagttgtgggtggttgccggagcggcgaactcgtcgtcaaagtgtgcaaagatgggtggtgtctgctatcgtacggattcgataatccgtatggatgctacgaattagataatccgtatgattcttacgaattggtcaatccgtatgattcatatggattaggtaatccatataactcatacggattggccaatccatataattcatacggattgaccaatccatatgactcatatggattacctaattcgtatgacttatatggattgaccaatccgtatgagtcgtatagattatctaatccacatgactcatggattggccaatccgtaagagtcatatggattaggtaattcatatgccttatatcagtattttttttataaaaaatcaaaaaatatatatttaaatgagattgatttgaagttgacaaataatttcgttgacaaaatacaatacaataaatggatttgccaatccgtatgaattatgtgaatctgtatgaagcaaaaggcataaaatagtgaaggatattttggaaatttcactgttacgaaaatggtgtattagaaaaacgaacggtgtaggaagcaacattcttgatttaaaatatagaaagccagaatgggaattgcttcctgcgccccctaaggaaagtgaaagtccagaaagtttttttattcttttatattgtccaaaacaggttgttgggggcaaattataaattgacaagccattacctgagttataatgattacgaagttcgatataatgaatcagaaacaaatgcaattagatacacattttgaagaaggaaaatgccccacatcggctcctagtaaatgttcccttcttaaacgttttttctctcaatatctacatccaatgatccaagattttggccttttaaaattaattgtcgcaaaagaaatactagtacttatataaattaataatctacttgtctcaaactcattgattctactctcgtttcaaaatcagtaactcatggattctactccatgcatgtctttcagatcctgttttaaatatgaagtgctaaagctgtaaacatggatagaattatttctgtaagattgcttttgcgcaatattagtaacaaggagaatatgatgagctgtcaattacgcgtaaaaatgcttttggatcctgattattctcactgacgattggactaaaacgatgctccagttttatatgtataactttacaacataaacttttaaattaaagttgattagttatcagaagacatttgtcgggcatataggtcgacaaaatgtttacaaaatttaccaaatattctacattatacatatattaaatgaaatataaaatatgaattgaaaatgataaaatattaaattcaattgatgaaagattgtttcttaataaaaatgtaaatttaaatacagagatacaaaacgagtgaaactttaatttgttgtttcgtggcaaccgacttttaacccgtgttgctttatgtagtagtgtatttcaaatttaaatctctatataagaattaaattatattagtagtttagaagttaatttttttttcacctatagtaatttcattcagctcaacctagagattagttaaatgtccaatgtaatatatatatatatatatatatatatatattaatggtagtaaaaaaattaagaaagtcgaagattctttgattaaatcatggaatcttgatcagatagatggattccacgaagaaccaagttctttatcagtttctttgtgcacacaaaataattaaaaataaataaaactttaattaaattatggttgacaaaacttgatgtgcctattgatttgaccatgagctaacgatatgtttgctcatgcatacaaaatcagttatcttctaatttgactttgagcgttgaaaaaccaatcctgcagttattttaaattaaagtcaatggtaaaaaatttgctggcaacgtacttattttaatacattctacactatatattagttaaatttatcaaaaactgtataagtgcgacctattaaatatcaaactgataatttattttttcccaactcaacttaatttgtatttaaaactcattcttctaaaacttaataatactgttcagatttgagacaaaacgcaattcattttgattctgctaaacgggaatcaacaaaagtaaaaccaagtagttaatattttcagggaaagaaaacaaaaacaaaaacaaaaacaaaaacaaaaaacggtatcagcgtgccgttctcctccgaaaccatcacaatctggccacgatgtcctacacaactacgagggcgaataaaatgaaacagttcgaaggacaattaaagccatgctagcagctctggtctggttgaccacaatgattaagcacagctcaaaaagctaaggaaagtggtggaaaaataaaaataaaacaaaatgtcacctggacctaaaaaagaaaacactgagttcctgatcaatgtctccctctggatcaatcaagtggaaagattcacagttgtctgagccacgaaccctctgaaagctagctctaaggtacataagttgatcatcttctttgttcactaactccttgcacttcataaccccagttccgacaaccaccgaacgcatcaacctcagcgcttcgaaatcagtgttggagggcctgcgcttaacggcataccccaccttcctcccattgcagtacatagtccacaaaggcgtggacaaaagtgtgtctatttcgccatcgccgtcgtcgtcgttgttgccgctctctagggcgattcggagggttcctcctctcatttccttggccaagatggttgttggaactgccaactctaggaggagaattggattggtggagttggcgtttgcctgaatgcaaaagctcacttttcctctgcgatatccgaagatcgtgcctgtgatattggtggtggagctcatcagtgacaatgatggtgaataaatatatttgcttgtgtttcggagggtctcgtttgttcttgttgtttcatcttggtcttcttctataatggtggcgcagttacatgtggggattagtagttgcatgagagaacgtagcagcctccatgatctaacttgtttctcgcagtccactgtagtcacgccactggccatgtagatctaacttaatgtcgctattgtttcagtttatagctacctcttcagcatggtttagggtttgtttatataatacatggatgatgtaaaatacgctaaaaaatatactactagttaaccttaagttaatataatttttatttaataaaaaataaatttatgataaatataataatgtttgttggtataaaatattgttagtatatattgatataataaaacaaatttataattaaagatgttgatcaattaatatgagattattttagattaattagtatttttgaatttgaattcttatatgtaattggatgaaatatttgaaagaaatattatatgacttagtaacaaaattattttcagtaaaattacatgcaatctggtatatatactaaagagatattaatactcaagtttttcattagatcaaataaaaagagtaccttttcttcccaataatattagttagatctcattttatgttattgtgataaccaaaaatgaataaatattttacaagatatatataaaaaatggttgtccttttcgttttttgattttaatattcaacggttgacctcatgcacacttgttcaaaagaaatccacaaattcacggatcacagcgacatgtgtcgaatagtgtggaattggccaatcgggttcaacatttttgggttgccaactaaaagggttatctaatgcagccccgttgcttgattctgaaacaactcatgcacacgctcagtggatagctcctgttcccagtttttctaatttaaaatatttctcttatttattatttgaggtttcttttcgtttgtggacaaaagtacctgtagcacgctggagcagctatgtctgaaaataattaatatgtaaatattaggtgtcttctttcttttctctttatttttgtgagattaaactttgatttcagccattgaaaaatgcagaaaatttcggagagatttccgtacagtcataacccaccaattcactatcattcaatcattaggcaaatagatttcggaccataaaactccaaattcatacacactgttcaactcttatttaatttgctctacacacacacacacgagcatctttttatacttttcatcaatgataagacctgcctcaccaaaataaaagagaataaaacaatgtgtcggacttattatagcagacccacaaaactagcactaaatcttattctcatgtattattttgcatatagcatgtgagatgaactttggaggcaaagcgtgttgtgtggaggctaaaaaaaattggatgtgtttagctttctagcctggttgctccactcttgtcctcccatttcctttcgcttatttgtcgggtatcgaagactgtcacaggaaaaaacttgatcttccatattttttcagctttcctagatattcagtacgaattttgatgctatgagcagacaaattttgatgccagagataatgaatataatttacttgatgcataagttaatttgtagaattattttttttccaaaaaatgagttttaacttataaatatattaattttagtttatgaaaaatttatttatttatttatttattaatttcccccctataaatacttaaaagaaaatcttatccaaataaaccctaattgaataagagatcatgacttatatatttacttatgcaacataatggcggtaaatccatcttttcattgcaacaattaataagaaaatcaaattagtcgtgtatatttagataaggatataaacaacttctattcaatgatgttctaaactattacatgatagaaaagagtaaatatttgttttgaagaggagagtaaaagtttttcttcaagaacaaaggttctcttagtttatatatatacaaaagttattgtccggtcgtcgtcatctgtgaacgactgaataattctacattttttttaacattctcctctctcacttaaaaaaatcatacatttacacatgacctactcctaatttaaacaaaaagagctaacttaagcccaatactaagacacaagtcttaaaccacataaaattaaatgaatatgtttaaagcccaattacatattagttattagagtgaaactttcggtagcttcaatttttacttcagataccccattagattctataatatagaattatattttggagtggacattctgaaatgtaatgggttgcttgagaggtgcaggaagcaacactctagttatcaattgtaaccggtattttgttttcgggctaattaactaatacccgtgtttataactaaaacatatatatgtggtcatgttcgatattattttatctatatcttttatgttgaaaaagttaaactttggacttgtactgcattctaactatgtatgtagttttcaacttgatcatccctgtattttttcttatcgaatccataatgtaaaatccgaaaaaaacaaacgtttatttttcgttcacttatataagatgtaattaataattatatgcgttttttaaaaactctttttaggatttttcacacacacttagaatacaataattatgattttcaacaatatcaagataaaatgtgcccggggttggatttcatgccactttacctacttgtattaatgataactaaaaaacttcaaattcaacaatcaatcctcaaccataaaagtcactagaaatctaatcccttagtggttaaagactaaatctcattattaattcctattccctaagtaaatcaataatgaaatttgcattaagcacatggtttgcaagatggctaagtattcatgcatacaccattcctagtgtcaaacccctagttatcttaccctaggtataggttttagtaacattttccaaattccaatgcaataaaagccaaaaatatgtggtttatcatgccacaactaaaatagagagaaagagaataagaaagaagattgagaaatgaaaaatatattaatataaaaaaaaatgcaagatgttcagggtcattacattccaaccccaaatactaggagaatttagctagagagagacatgaaaatctcaaaacatgaagaagggaggcaaggtcttgaagagagagtcatggaaaaagcttcacaacaggtcccaacttcaagagaaatgttctctaatgtaaatttggtcaaatcctcgtatcctgtccttagagcagctccagcggtggtatcttccgcgtttcttatctgagctggaacggtttcttatttttcttttccattggagtaatccagctggcaaaaatatgaacctgaaatttaagatgcgcatctaatataagaaacgtttcttaaagggcccacaaaaaatccctaaggactgcatataagctcccaccgctggagctgctcttaaataggatctgacatgtgcctttttaaaaaaacacatgtgacacacttgcactcaagcgctaatttcagctcgcttaaacgtgaggtagaccatagcgctaattaagcgtgagttaggctgtcttgcttaagcgctacatgatatgtgcttaagtttgaggtttaatctttctatttgtatatgaaaaaatatttattagaaaacaccaatctcctaaatagatattcatattctaaaaaaaactgacgcatgattagaagatatcctaagcatccaaaaaaaatgtcacttttttttattaaaacaataagaaataaagaatataaaatgaaactcttgtaggatctgaataatcaatgctcttacaacattggttaagaaatttaaaaaaaaatatttattgtaaaaatcataagaaaaggtaaacaaaagtcactaccaatgtaatttgtatatcccaataaaaatctttttctttttagtttattaattaatattctaaaaatactggttaacatttgtcattcttgtatgtaatgttgtagagaaattattaaataattttttatttttacattttcatgatctcaattaacttttgtaattaaaaaatggttctttaattaataataataaattaaacaatgattgtgtatataaacactcacttaaacaatgcagtgtcaagtcaatctgttataaacttgtcaattaacgttggttttactttggagaacctctaatgaaaattttcattttgtataaaaatattaatatatttaataccgtgtcaaatagagattaacgagacagaatgaagaaaaccatgtaataacttcttttaatgatgcgtgcatagtgattcatcactcaagcaaacacttaacggtactgaagcacctaactttcgtctctggttcgttagttagaagcatgagcgggaactaaccttagattggcaaaaaaaatgcgtgctatgttcaccttctattcaaatctccaaccatcgatcgaacaacatgtacgtacatgctcctcacttttttctcaactattgtgcttctcttcctctttcattttttcaatgctcctatgggaagaaccaaagtctccaccctctttgccaataaccacaacaacaattacatgcttccttattccaacaccatacgacaaactcttgtaaacaggccaaatacccacaaagaccggttccccttttcaccctttgaattattgcggcgccttattcgttcaagtattccttaccatatcttcttccattttcattcacacttctctctagctagttattagttactgttatcttatatactgaagtatttttatttttattttttttttggttttctacttatccgggttgagttcaattgcattgtaggaaaagtagatgtagactcaaaaactaaggaagaggagaaagtctactcttggttatacaccttggcccagtcagacaaaaacctggttttcgagtacgttaggtccactgagagaggcaagtatctgcactctgcagtaccttgtgaattctacattgatactgaaaaaaatgtctactttccgaccatataagacaatcttatccatgtgttatatgattatgtttaacttatttatattttattttatgtgttgtcgctctaaagttagaacttataactacgtagttcatacaaactatccaaaatccattaagttgatgctagtgggtcttggttgcatgtaaactagactgcagggtccagtgttttcagcttttcatttctgtgaattgtgatcactgaattaaataccaccctctagttttgtgccatatgaaaggtagtatttttcaattctgtgcaggcttaagtttcacagaagccgataggagactgagggaaaatgggccaaatgttccacttgagtattcctttccaagatggtggcatcttctatggaacgctcttttccatcctttcattatcattctgattgttttgtcagttctgtcattcattacctgcgacagtccaaatggatttatcatgctcatattggttttcatcagtgtcacccttcgtttctatcaggtttttctacattaattagttggttgcattgaaacagtggaattagtacttctcttcccttcacttcactctaattccgacctttgtttgtgtctattaggaatatagcagctcaaaagcagcgatgaagctttcggaatttgtaaaatgtccaataaaagttcaaagatgcgctggtagagttgttcagaaagaacttgtagttcaagttgatcagagggatgtagttccaggtgacattgtgatttttgaacctggtgacctctttcctggagatatcagattgttatcttctaaacaacttgttgtaaggtgtgttatgtcaaccggaaaatcttctggtttagtagattagagattagtgaacacttgtattcttcccattgccttttcagctaactaaattatcacatggtgatttcataccctgttaacagccaggcatcactaactggggaatcttggacaactgacaaaactgctgaaatcagagaagatcacagcactcctttattggatttaaagaacatctgctttatggtgagttagtaacacaattccctattttgtattttgtttccgttgaagttatagcttcattttaagatgtagccatcaaaaatattaaatttccgatcagagatagtctgattgaatggagaattttgctgagaaatgattagttattaacatcacagggcacaaacgtggtatctggtactggaactggcctagtgatttccactggatccaatacttacatgagcaccatgttttcaaaagttgggaagaagaaaccaccagatgaatttgaaaagggtctcagacggatattttacttgcttatttctgtcattctagcagttgttatcatcatgtttgtgataaattacactacatctcttaacttgagccaaagtgttctttttgccatctcagttgcatctgccctcaatcctcagatgcttcccctcatcattaacacatgtcttgcaaaaggagcacttgctatggctaaagacagatgtatagtaaaaagtttaacatctatacgcgacatgggatcaatgtaagtataaattcacattgaaaatcaactgattgatgacttggacactaaattcatatgcagttgcacacatttgaaccaacttataataaaatatgaattcaagtttccattcttacccagctttaactacgctttcccctgtctctaccatcaaaatcaaagaaagggaaaaagagaattggaacctacaattaatgattagatcagcatgcgttttaattttgcagattaaactagtggaaaccagaatgtaaaaatctatcattattgttgattaattttgaataaagaaagatcagcaaggcacgttcttaacaattatcaagacataaatataggaattatgtattagaaacattatgaataaatatgaacttgtagtaataaacagagaaattgataagtcggtctaaattgtgttctaacttctaatcaatttggctaattgtatacgtggtgctaaacttctagtatatcaattattgatgcaactgcatcattaacaatgaatgaaaacataaggtccaaaaatattgcaaggaatatatgtcttgttttaatccaaatatgcatctttctagcaaattctttttctgcgtacttatatttttaaatgttgcagggatattctttgtattgataagacaggctcccttacaatgaatcatgcaatcatggttaatcatcttgactgcaggggtttaccccaagaaaaagttttacgctatgcctttctcaactcttactttaagagtgatcagaagtatcctctggatgatgctattctagcatttgtatattcaaatggattcaggtttcagccatctaagtggaggaagatagatgagattccttttgacttcataagaagaagagtatctgtcatcttagaaacagaaggcggacactcacaattctttggcaggttcctggtaacaaaaggagcactgttagaagtattgaaagtttgttcttttattgagaatttcgataaagatgaaatctctcccttctcttcagatgattatcagcagattttaaatctctcagaagatttgagcaatgagggattaagggttatagcagtagctataaggaagctggaaatggtgtgtcttttcttcttgcatcatccaaattgggcgtacatttctcttcatatattttagatagaacactcactaaaaagatcacattgtcaaaattattctcttaggtgaaattattttatggttcatgaccaccacttatttgtagtcctggtcaatctttatataacacataactaaggttttttattttttcaattaacgaaaaagagttaataaattcagctacgtgtcaaggggaaattagctaaactatagatacttagcagttgtaaactatacaataacttcttattattgtagggaacggtcctctcatgttgattttttacatgacaacacgtgtctatctctctcatcataagcattaaataggcggaatcttattagtatttgtgaatattaatggagatagttagaaacaaagtttccacacaaggttatgtaaaaattcaatacgagaggataagagaataaggagcacctcattagctgtggctgactcactttcaatttcaatttacgtgtgacattgcagccgcaaatatgcgaaacaagtaatggaagcaagagagaagaagaggatattgaaagagacatggtgttcatcggcctcataacgtttttcgacccaccaaaggactcagcaaagcaagcactgtggcgtttgtccgagaagggagtgaaggctaaggttttaactggtgactccctctccttgacaacaagggtgtgcagggaagttggcataagcaccactcatgtaataacaggtcctgaactagaacaacttgaccaaaatactttccatgagacagtccaaagagccacagtacttgctcgtctcaccccaattcagaaacaacgagtggtgcaatccttgcaatcaattggaaaccatgttgttgggttcttaggagatggagtgaatgattcactagctttagatgctgccaatgtaagcatttctgtggagtcaggtgtagccattgccaaagacatggctgatattatcttacttgagaaagacctcaacgtgcttgttgcaggagtagagcatggtagactcagttttggcaacacaatgaagtatgttaagatgtcagtgatatctaacttgggaagtgtcatttcactcctcatagcaacactgttattcaagtatgagcccttaacttctagacagcttcttactcagaatttcatctacagtgtgggacagattgcccttgcttgggacaagatggatgaagagtatgtaaagacacctcacaagtcatcagagagaggcttgtccatgttcatgttgtggaatgcaccagtgtgcaccctttgtgatgtggcaacacttttgtttctttggttttattacaaggcttacactgatgtgactcagaagtttttccattcagcttggttcattgaaggtctcctattgcagaccctccccatccacttgataaggacagagaaaatccctttcatacaggatgttgcatcttggcctgtgattttctccactgttgtgacatctgcaattggaattgcacttccattcacacccattgggaaggtcatgggattctcacttatacctctctcatatttcggatttttggtgcttctttttctggggtattttacagttggccaggtggttaagagactttacatattggtttataagagatggctttgaatatcaaaacattcatctgtttagtcgcataaaatgctactgttataaagtcaatatcaagtagaaacttttcgtgtcatcaaacacatccaacattgctgtaatcgtaccctacaaatttcaaaacaataggaattacattcatgaatgaataatacgtgcattaaaattttgtatactatatttagctaatttcagatagttgtttatgttccgtccgaaattccagtgcttcctgtcatttttctatttgtgctatcagttcttgatccgcttatcaccttcagacaataagcatctatcaaaacatgtggaacatttgaaatcttttacttgtctgcatttgtatgagttgcatattgtcccaggccatgtattaattaacaaaaccggtttagtatgtactatttgataagaaaatttagtttgttagtcactaaaattatgtactagagattattcagatagaatttaaaaaattaggctaaattacttagaacgttgaacaagaaaaaacattcataaaatgtaggaaaaggtcctaccgggagtcgaacccaggtcgctggattcaaagtccagagtgctaaccactacaccatagaaccgtgtgctatatatttcctatgattataacaaatataagatgataatagtgtcttaaaaaaaagatgcagccaatagaaaaagaatttgagatccatgcaaaaagcatatgaacattgtcactctaactattcgtttatttattttttaatagatccactttcttccttatgatgtgctgatttcgctatttaaaagaataaaactttttgaaaggagtaaaaatgtaaaatttttagcaaaatgttgatccccattccccactaacattttgtcaatagaaaatctactttagattttgtggggaaaaaaaacaaagtaagaagaggaaacgttgagaataatattgcaatcaattaaaacaatgaagtaaatgataaaataggtttcaacaaaaataaatataaaaagtaaaagaggacattgtaaaaaacagcagtattaaatttgagtagcacgacaagaaaactaattaaaaaaaaaaaaagagtagaagccatttagttgcgctttaatttttttgtgagaagtaaagttataatctttagagtaaattgttcaagccttccttttattttgtagtttttacataaacctctcattttataaaaatatgctataattaaatcccgaacctttgtttttatagcatgctacatttaaatatagaatcattgtttcataaatcccgaacctttattttattacatatattgagtcactatacaaaaataaaggttttttttacgttgaagtgtagaatataaatccctcaaaaattttgtcactgctttaatccttgaaaagattgttatcgtatgaatatatcctttgaagatttatttagtcgctcatcaaagattttattcaccactttagtcattattcacaggatccctttggtgaaatttaacatctcttctctcaaagactaacatgattatattttaaaactttgaggaactaatttaatgataaattaaatctttacaaaactaatttggtgataattttttaagaagactaaaatgatagtatttttatttcgcttagtaaaaacaaattaaaagattaatacagtgacccacgtaagtctaaggatgaaattttaagttttatatggttgaaatacttgttaataaaccttaaaaatgtatggagtttcatgaaaggacaaatatttgggatccactagctagtaattctaagaaagagacacataaaatatagatagaggaaatggatttagcgtttaatatggatgtattgtaaaaaaaaaaaaattagtcatcaattttagtataatttataagattgttattataaaagtcaataaatctacttacatgatgggtgtaattgaaaaatagtaaatgatgtttaatacaagttttttttttttttgacaagtatcatgttttatgaaaacaagttcaatgcacaatctgagtattataaatccattggatggcatcatgtttcatacaagttaaccaaacatagccaaccaagtttgatgcatgattaggcaaaaaaagagggaggggttatagaataaaagagagagcatccatattcatatccgcaaactcatgttgaaacatacaaaacagtggtcaaatttcccaaacttttcatataattgtatgatttgtatcactatatacgtaaagcatatagataattgctgtaagggaagacagacagagacatatgtggagtagaggcatcactgctttgctttggataaacaaacgttcatcctccatcaacagcccttgatctttaaagtggacctttcatcctcctaaattagtgctttacaatggaagagttgaactctgactcctagagtgtctggagaacaaaaacttggtgttatgtgaaaaagatcttctcattctcattgagacggagaccggcctctttggcaacgcacgtccaattgaagccaacttgttattaatagtagttgttgaagttgaactcccactaccatgcttctcatcagcaacaacactcatatccttgttacttgaataattcactttttcaccacaatgatgggtatctaaatccaccaccacatcacgaaataacaccattgaataagcagaagaagaatccatggaaaccgatcttctcagaggatgtgtttcctcttccacttccactgccgaagacacatcatcttcaaccctctcatgatcagaactctgcacgcgggcctcttgatgatcagaaacgtttgaaaccgtgtgattattctgatcaacggctctgatcacatgcgcgccgccagtttcgtcgcgtagcacaggtgcacgacacaaggggcaatttttgtgagaccggagccacgtgtcaatgcaagggatgtggaaggcgtggctgcacttgggcaacaacctcagactctcgtcgtgttcgaactctccgaggcaaaccgaacactcggtgccgtctatgatgccttcgcctttcttgtatttgaataccgtgatagagtctatgagggactgttggagacccaccgtacggatgtaccatatcgggtggacaaccgccaactcctccacgtcatcatcgttatccgaactcggaggagaatctccgttcaaatcgagcaatatggggccgtcgactcttctgttttggttattgcggctatatcttcttgagtagaagtaccttatgagtacggacacggtgcagagaaatatgatgacgccaaccatgcatgccatgacaatcatcgagagttgaaaaacatttctgtgatgttctttaagggaaggtatcgtgaatttaggatgtggggtacgatcatggtgttgttgggttccattcttaggaagaggagccattaacggaacagaggtagaagcaggggtcaagtattctaatattctatggatgtggaaaatattgttgcatagagtgtggaatgattaaatggtaacatgagaaattcgggcttattttgatgggatgggaccatttcattttctattggagactcagactcactcgcgaatttacttagtgctttcttttttttccaagtccatggactttgtgatggtttccgcgttagctttaatggtggtggggcgttaccagattcttgtaatctacaatccttttcatcaaccaaactttctcttttttgttttttcataaataaaaaaaataggacatttttggttctcgctttattttatttttttaaaaaatagtttttgactaaacaagttatttgtgtaattttaaggtgattttatattaaatagtatagttgtataactataagtaaattacataattttttattataaataaataaatcattctcatataagaatatcttttttacacaataacataatttttgtcattaattaacgtttttctatgcaataaaaataaataagaaaaacaaaaccaatatatagaaaaagaccattcccatgcataatatataaaagtaatgtaaaaaacttattcttataaaaattcaaaatttgaattattattttgtacgttattcgttatctcattaaagttcattagctaaagacatgatataaatagtagattaacccgacatttaagtaattacttgtgacgtaaatatatctccattttttagtctataacagcataaatcacatgtgaataaaacctttttaatttaacataaaaataaatacaaattcgactatatttatataccttttttatacaactatactcaacaatttctttacattagcatctatagtcaatcttgtgttaaagaaagaatttgaaatacccatcatacttgataattttttttaaaaaaattaattagttgtattcgatgtcttattttatgtcacaaaatagatattattaaaaaagatttatctactcactttgaaaacttttcactatacaccattgtagtataatcacaattggattgtttgaaaggttgtttaaaagatgggaatcaatgtcaatagcaaatttatcccacattgcacatatgatcctattacctctatttgatagaaaaatgtaatttaattagttaataatttaatatatgtcattttaaatattaaaaactatggaaaaagaagaatttatttaaaaaatactcaaaatctttaagggtgatatcaataatttttttcgaacttgtatttatcttgtccttctcaatcacatggcctataacattatattgaaactaaaatttaaacacgttagtatagaaaaatagttaatattatttaaatttaaattgaattgaaattatctccaaccattgcaagcaagaagagttgtaattcttaattcttcgaaactctcattctcaccatagatgatgtattagttttttttttttaagtgtgaagcttaaggaccaacaattattatttatagacattctattgatattctaccataaaaaatattattagtagtcattaccattataatgatagttactaaaaggttaaccttgcaaattcatatcgttcactaaatagaattaagcatggttttaataaccatattttgtgtttcgatcaattaaagcttattgtttttttaacatcgttgcaaattatttttccaaaattacccccgcttacttccttttatattccaaaactaccttcacctattttcttttatacatataaagataacattcttagttattaaaatacatatataaatatttactcttttaatgcaaaactattaaaatataaaataaatttttttattttcgtaattatcaccttacaactcatcccgacatcgtttttcacaaggctgaataaaggtcggggtataataggtttatttttattcctatctaacctgaaattttgactcaaatcatttatttatatatgaatccagtgagtaaaacctgagatatatggaacgaaactaggtcaatctaattttttaatataatatatcgattttaacattatatatatagttaaaacataaaaaaagtataaaggtaaattaaggtaaattttataatatatagtttacaataaaaaattattataaatttaatattatattatacaaaacattatcaacacataattattaaaaagaattatacatttttaagagacattaatggtaaaccaaactaggacgacccgaaccacaacctaaattgattctaataaaacacacagtgtttattttcaaaactttaatccatccaaatcaacctcggtggttaggttttactcatccctagtttttaattgattaatagtgtgaaactttttatgttaatagcgaataaaaaattaattcataaaaattattaaaaaaatgagagataaaaaaatttcttaaattatcaaataattttattatttataccttaaaagaactacaaattaatataaaagagtgaaacgaaaaagaaagttgtataagaagaatactataaaaaaaattcatcttataagattatatcttacttaaggaataaatcaaccaaatacatttaattaaataagttagcttatcaattttcaactaccaaatttatcagttagatctttaaatactactttaaattcatcaaagaatgtaactccatatataatttacaataaattctttcactttgttttaaattcctacccataaaaaaaatactaccttaaatctctccttcaaaaccccgcagcccttcccgcttaatccccgttttcttctatcaggatcaaataatgcaggacgaaaccaaaaacatatagtcaacttaaaaacaaatctgcacgtcataacagtaatcaaataagagcatcgctttatgactgttgatagatcaagaatatgatatgttacacaagtaaaagtttacccaaaattgaccattatttcatttttttttcgtaataatgctgtgtttataaatcatatatgattgttgaaatccaatacctgtcaaatttaaatgtttaattttcaagtatctcatgatctgtcttggcggtgcccagttagtggtgtcaaaagaggaacttttcctgcaattgctaagccataagctttgagcccgtcgtactcagcaggatattttgtcattaaccttattgtttgaactccaagatctcgtagtatctgtcagagatttatcattcaattagttgaaaaataatgcttatgctgccaaaatgaaacaataatttacgatgaaacatgcatgagcgaaaataaattgttccgtacatatatgacggttaacagggataaagagacactaaattatatttattttgatttcttgttctggatgaaatggtaagaaaattgaagtcagatactaagacaagatatgtcaaaattttataaatactattgttatagtatccaaaagataaagatttcttgattaattaggaaatgacgactcaagataactatgtattaaagatgacaagaataatcaataatcatccaagaatttaaggttgtggaagttttgagaaagtgcaagatttggaattcaaatatcaagagtttgaaattcaaaatgttagttatcagaagttggatgcactttctacacctgtggactaacttataaacttaatatgaattgatttcaagatagaatcggaacatgtagtacatttcagttggttttaagatggaatctaatattttgtattacacacttccattattactagtaaatttatcatttgctgatctcaaatttgactttactgatatacattaccactttgtattcttttaattacttatttaaacagtagaataactcattttctcagaagttgattacttatttaattacttatttaatatggtgggtggtccgttatgatctaggatagattttaatatcatcttataagagtttggacctaactcaactcccagagcaaattcaaaggatgaggatcgttcccacttatatactttattttagcattatttctagtcaatgtgggacttgcgttttcccaaataatataatttatccttcacctcacatagaaacctcctacctctaacttgggaacttgtgcactggaatgcattctcgcactctgctgtactgggaaaatcaccatcttatctacctaccttccttccttctttctgcctaaggacacttggattcaacatatggagagaaaaaatgacaagccaacgttttattttacatcaacattaacatcaacagcacctttaacccaaattaattggggtcggtggtagatgaacccaatgataaatcgaaaataaagcaaaagagagaagcagagttaaatataaaagaatggtgagaggagaagagaaaagaggaagaaaagaattaaaacaggaaacaactggaacatagaactactaaagggtttaaccctccatcagacttatagcttttctccactccgtcctaagacataccgtccgccaatctaaaacccactccattaggtcttgtttaactacctttccccaggtaagttttattttacatgcaggcaaatattgacattacccatgtttcaataaaatgcaaggaatctccgttttatttacattattacaataaaaactgtataaaaattccaggcacacacaatcccaaaattcaatattaaccagatggatttcgaaatctgcaggtattactttgaacttgcgccagactcactcttactctctaattatagtgtacatattcaatgttatagattaatgtaggacttgtaatccatttgattcattttcatataaatcccaattaatgttttctatatatgaatatatgaacaacactatatatataaagtgatgtagggtacgtctttacatgtggcataagtggaatgtatgcctggacatggcatggaaagaaattaaaaaagagaatatacataaaaacaatggtaattaatgaaaggctgaaagctcacttggaaaatgtgtgcagggacatggaagagcaatgaaaattgacgaaagccattcagtgtctgatagatacggacaaaggtacgtaagataagaagagcgaacaccagagattcgttcatctgcaagatatggttccgcgattggtttatgtatatatattggtagctctgctgaggtaccacttgtctcttcataaccagttacacttacaaatccaattgccttgtttgtttatactttttacgttctttcctgaagaagaattttctacgtgacctttggtaagcaggaatgtgaaaatgtaaaaatttgctttggtttacaaagaaaatcattgtcatgataggaattagcgggtctagtatattctttttcgttcacaatagtcactgtttgttttatgttcaaccacaggtatctagaggtcatcctgtttaaactgaaacaacttaagttcatccacacatttagtggttcacaatactcatgtttgacatcttattcaaagaaaatcaagcattaattatttcaatcaaatatacaagtacccattaatatgtaattttcatattatcagattcatcaaagacaaattcaggtgtttatattagtcttcaataacatattttcttataatattcttttactgatcctttttaatatttaataaaaaaattatcagttttttttataaaaaaaaaaaggtattcaacaaaaatatacacacttgatatttccaatattataacttggatgttgagattttcactagagcttaatggggaggcaaaaaaaaagtttttcaattgatgtggtgatctcattgtcatatcctgagtcctacccctaactacctagaaaggcaaccgaggttagtataaatgccatttccgcctctgagaagggcaatgtcagtggttatggaatgaccaccctagttaaattccataccattgccaattgtaaatatatattgaatttttcttggtacgactttaggacatttaaattcccgaatgccgtgagactatggttaaatatttccaatttagcactctcttagaatcatacatagtttattcctagaatcatttacatttgtccaagccaatgctttagagttagagatttacaggaaatgcataacttggacattagaaaatgcaaattacagcatgccatgcctcaccggtcttcaggattgcgttaatttacctgcaccagagtaatgtttgtaactttctgttgatttcaaacaactttcatatgacgctcaacttatgtttatgtttcaggtcttggcagtagtagtactaacatttttttattgacaaatgttagttgttaattgttaatttttttttgttagtgaaagaatcaaactcactatcttttcctcccttttttctccttctatcaccaagttataactccgtggtactaacatgttaactgcaacagaattcaaactttgtgtaacattcttatcgttctcttttatagacatgcataattgtccattttgagatgcatattacttcattttcatatatgaggataattttgttttttttctcaactttaggtaaattttataagttgaaatttctggcactgataatttaatatttgattattttccccctcggtgagctcatgcccaatgagatgctgattcggattaggaactgcataagctcaaacttacatagataatcgttgtaaaagatcatgccttatttcggcatttgggcaattgtattaaagtaattcaactgtagtgttcaggtatgacaactgagaactatcaaaagttgtgatgaatatctagacatgtaaattatgaaccttgtcttggtgttattgtaaaatgtcacaatcactgtcactgaacatttcatatgacttggatacaaagtagaaatgtattatcagaaaatacactacctttttttttaatcttgaaatcaagtccatttcagctttgctgttactcttgtttgtttaagttcattttcttgaaatcaaatactttagacaatgagaaaagcagttgaatagaggaagaagaataaaggtatgtttgaatgtctgttcaagatgtggtgcatgaattccaaagtaaatataatggcccacaaatttcgttttgcaaaataaagggtcatggatgcttcttggaaatggaggttggctcaaacttaggtttacaccagaaatccaaacacgcactaattggttatacaacagatgctacctgaaatattctccaaaagtatttttctgtctttttggcttattgaccttggtgcatatgtggcgtgtgccatttttatgaaacaaagcatcctgtctagcatcgtagacctgaaataaggattaaagtatgtggttttatttccttacatgttttataatgtgaatgtctcctgaatcagcaatataaaaaacgacatttcaagtgtggaggatcaaatgcatgcggccttatctccaagagtagagaagaactcgtaatcatgagatcacaaggctgaaaccttattgttccacctaggctcatcatcttcctaaattagcaatataatcaaatatggaatgtcttgtttgtgttcccctacatatagactgttacccaacttgttcaaaatttcaaatggatgtattagtttgtttaaatttagaaaaagaattttttaaaaaatatttttttagtaagtcgcttcttaaaataagtataaaactattttaagtaaaagtaatttatatagacatattaaaaatgtaaaaggttgctttttttattaaaataaatatttattttaacaaataaatttaaacaaattttcctcacataatcagtaattttgttaagaggataaaacagataatgggattaaggatcattttcactagtctatataaacaccaagacaaaggaatgatcattggtggaatgagcttgaaatgtaaatataacatccaaataaggaaaggactatggttgatgggaaaaaaatggatgtcttggtactctgccttattgtgtacggatttcattaattatacattttgcatttcataaatggatcatagtggctataggtatcggattcatttcgtttatttatgttcattgttttgctttgcagaaacgaatgacaaatggttggtaggagatccatcatgttattctttaaaaaccttaattagtgcaatgcaaactttcttccttttagttcaatgtattagtaaagggataactgctctgattcttgaacacttgaatctcaatattgttttaatgttgttgctatggcttctgcattttattttaggttattgactttttcattccgttaataatgttatgtggtgatgttatttttaactgatactttttctcccatcatactagttccatttgtatgtttttgttctgcaatgatttttttgtcttatgatgacagagtcaaggcttaatgagttgactgctactgatgtgatcaagaattagttttataaatcttgattttacaaaattgattttgcataaaattaaaattgaaatgaattgatttatgttagaaaaaagctattccaaaaggaagtatagagtaaaactttgtaagaatctctcaactcaatccaaaagctacaaaggacaatatttctggtatccgaaagctgttaaatgttttgaggtgatcatttggttgtcatagtaaagcatatcgacccaaattgaaaggtttattaaccaaatgttgggaaacgaaagggtaaatacgggccagattttcatcaatgaaaaatcgaacaaatcacaatagtgaatttgagacgatactttaacttaacattaatgcttatgtttatgaatagttgttttcaattgtcttggaagaaagagagagaaaaaaacaataataatatcactcttatgaaaaaggaagccctcctcgtcaagattctgttttctttcccgtaacttttgcttattctttctttgatttggatagcactcacaagttagaaaagagaacaaagttgcttaccactaggtgttatgcgctgtccgacaaagcctctcacctaatcaaaatcaagccttctttttctttgatggtggggggattcatctattaatttctcctttgtttttctcttcgttgtgtatctttgttgtattccatgcacagtaactggtaggcccttaccaaaccaaaaaggcctctctctttcttactttctaaagcattggaactaatcaaaatcactttaatgaaaaccatgtgattggctgattgatcatttgttggatcggtgtaattcactagttaactaaggtggtgttagctttgtttcccccccccccaaaaaaaatttcatattcattgatcatcatgcccttgcaagttgcaaattcaaagtttccctcttcctccatgcaacctcaaattttgtctctccacagcgtaaacttacactgtcttatgtgttcttgtttgtacgatcagacaagggacggggggcaacgtttttacgcattagcaaaggttgtgtgggtcctaagtttactgtcttatagaagaagttgagactaatatggcggccaaagattttgctaggagtctagattttggacatcaattatgtttgaattttgcaaggtgtgaatacagcccatgcagtgttgaaaaatgaaaatcatgcaccctagactagaactagcttttgcttcctaaacaaatcttaaatcacagattctgactttgtagaaagaactctctacttgcaagtgttccgctttttgcagttctacccacgatggcgttttatctacctaattgggcacaccacttttttccacttatgatcaaatgtctgatattgtttgatagcagaattttaattttgatgaaatttggctaggaaacgtgataaacgtttggctgcttcttctagtttatggaaaatattgttagtattactttatatatatatatatatcaagcgtcaaacgaatgcattggatagattttaaattgaattatactaatatataataggaggaagtttcttacctataataattttacaaagttcgagagtcattgtttctcttgaagaaaagttgtagtctagataaaagaaaaaatatattcataatctgtaaaaaatatttttttcttgtgaagaaaaaaaaaatagattaagagaaaacgcaccctcttgcgaagttagaaaagaccgtcaactttaaccagattttatataatgaaatttacatattgtctatcaacattaaaagtttgaaaattgaacccaagtctttgatagtgtgagttctagatgtgttaacccctacacactattatgtggaaaatgtattaaaaatgtagtctatgcatgactcatttaataaaaaaatgtttaaacattgaacccaagtcatggatagtgtgagttctatatgtgttaactcctatttatagactaatatgtgaaaaatgtattaaaaatttaatctatgcatgactcattgaataaacaattaaataaaaatccatcccgtttaaagtatattgtcttttatttataaaaaattagttaaacacattcatgtatctaaatgttgtaaagtctaggatttgtcccttaaagtcctatgctcgaccaatgaactttgaattacttaacctaatgtattataaaaatatgttaaatgattcatcattcatccaattttattttatttttatgcgtattcatccaattaaatatagtgatctagtcttgctaatctattttattttttttataattggacggattggttaaatttatatatggatgaatagaatagttagtaaaaaaatggactaaattgtcacccgacacaattattcgtttgctgaaagtgagagttcggagttccatacctataacctctactttatgggttttgttgacaagagcagagtatataataagaacattttcatataaaaaatgatagaatcgtggttttatttttttattttttttccagcttgtattaggagagtgcttaacaaccaaatcgggaagttaaacccagctggagaagtgggattcgtcagatatccattaaaaattattagtgtttgaaaacaaacagtgccttacccagatgcttttgaacaagtcagcgacacgaataattatgtcccagtgaccatgcaggcttattcttacgcaatcttaggatagggttcacgttctatctgggcacatggattcatgacatatagacatgtcattgtattcacaaaaatgatgccccttgtcggaaatgctctgtttctctgttcttatattgtgtttgcctaaatcttaggttcacgaaacatattgcttcggaagcaaagttctcctatagttgtctacaaattggacatgtctgttccccccatccaaggttttgagctccctgcaatctattcttgtggctatgtttggttctgcattaggattgctacacccaaacccgcgtttgagcatgtgtaacatgatttagttagggaaaaaaaaaaaaaaacaattgtaatttggatggtttaactaggagtagcttatgagttactgagttagccctttgccctgataaataatcgagaaatgctagtaacattaattttcttacactttctcagtgatttagaagtgagatccatcataattttaatttataataaattttagttaaatgtgttaaaaaaatgttgtcagcatttttcaaaataattaatattaaaagagcttaaatccaagatagatgataatgtgcctcccacaaaagcctgagccaatgtttgtgtgtctcaaaattggatctctaaggtagatgttgaaacttaagaatactatttatgaagatttggacgcttaaatccgtgaggggtagaggtagagttaagagacaattaaggttgaggtcatatattgcttgctattaggtcatctttgcatgtctttctaatgatgtgataagaaaaaaaatgaggaatatctgttatctgttatcagttcttcacccttaacttgcctgaattctagttttagacttttcaggtgttttgggtttattgaactgaatttgaccaagactaggttgtgtttgaaacaattataaacttattttttaaataaagtattttatttcaaatttaatatttagatttagcatttacagtttaattgtaaaattaaggtcatttaaaattaattttttgctatctcacccaaacaaatacttaaatttatataaattcctaacgattcataatctcgcacatgatgaacccatggttcaacttcgaagtctgtatgtctatgaggccgaagtatttgcagtaattatctctcgaacatttttgttgaatattaccccgaatttaatgtgagataaaatgctggaaacttgaaaacattgtatgggccggatcagcttgtaaaacggttattttgtttgttatgtttctacctcgttatttaattcactgccatgctgggttgggtcactatcggcctgcctgctcaatatttattttaacatttcataaaagaagctcaaactgtgaatattttttaaaaacttaattaaaatatattgacggtgtaaatattttttacattatctctccattatttttttatttaaatttttaaattttcatttttagtcaaaaacttctcaaattgttattattaaattgttttaaactttctttcactaaaaggtattaatcaaaattccaaaggtgccctaaataaaaaatatatataatattttctcgctcttctgatcttaatttgacattctactaaatcattcaaaattcattaaatttatatcaaattttaggaacaagaacattaacatacaaatgagttgtggatcacatttcaactagaagttgttaacttgttatatacctacatcaaagcaaaatattaaaaaatttaaggatctaaactcacccacaatgtaaattgaaggtaaaaaaatgaagtcaaaattaaggcaggtaaaattgaactgaattgttcactctccagttttaatacaaatgaatatcaataaaatctaactcaattaattaaatgaaatttataaattattataaatttttaacactatttataatttctatgaatgaaaaaacaaataaaagagtgtcaaatgcgatcttgataaccccaaaaaacttattgtaaatcgcaaagctggttctcacgctttcaacccgatgaagtcctcacaagtcacaacagtttccgttcccgtggggttatctatgccatggcccaccacacacgtgttgctaccattttacaaaactgggtcccattttggacataaagtatgcatattttctttttgatttttgtttttttctatgggagtagggcccaaggagtgatgggcatacttttgtgccaaaactcgctttctcccattctattcatgcttgcctgtcactggtcggtaactgctttgaaagggcctgaaattgcgtagaaaggagcacattagtacaatgctggacacaccacacaatttaccacatgtgccatatgtttaggggaaagtgtggggatctcttgcactttgctttcgcaacatttatcaccatatatgcctagctagctttccatttgccatgtaaaaaattcttattcaggaggatttcccattgccatatgttcttcatgatactctctagattcttgaattgaagaaggtgctgtctggtgccaagttatgatcatttttgtaaggaattgccaatgtatataaatagactccaaattaaaatataacgatcgtttttataaattgaattaaatttatataaataccaatggagtactcttttttcaaagggaataaatgtgccatgtacggggaaaacgtcaaataccttatgatttgtgagttgtttatttatttagatcatatgaacatggacctttagtgaaatgaaggaaaatagcgagggtcggttcaactggtaaacttaagcttcgtgacaaaaagggttgcatggttgttgaaggttttcattggcgcctgtcaattgcgatgtgctaacttattcaccttttaattacttttcatgaaaaaaattagcaaagtaaattatgttatttaactgttttactatgtggaatagtgaattatggagtggtttactaagcttgagatctaagagagaagaagataaatgcattctcgtttgtttgattaatctatgtcgcacatctaagagagaagaagttttttttataaataaaaaaactaataagtatataaaagataataataattctataaaattaaccttagtattaatattatattaaataactaaatgacacttattagaagtattagtagaaaaaaacaattaaaattccattaaaaaccaaatataacacttattttagaattttttttcaaatatgtctaactcaattcatttatcaatatccacaaattattataaatttatgatatttgaattggattcctaaatgtaaaaaatgtaaaatatataaatatatgttacataattattacatagcgatagtgatgattttaaaaaatgaaataacaattgttttttaagtctaaagtcaaaatttgttatatttgtaaaatctaaaaatatatttaatctaacaaaatattaaatgaatgaatgaaaatacatgctaacgtaaggaaaggagacttgtgtgattcactggctagagcagcgcgtgatagtagtataatagtattattactacgctgacgtaacgcaaaccttaagccggcttaaatagtggacgcaagctgccgaaagccacgccgtttccattttcatctgtccacactgtgcgctcctcgaggaaacggtcgaaaaaactgaagcctaaccggctaacccggtaccccaaaaagttgcatttgggttaaatttgggttcatttcataaccaaccgcagtagcagtcacctaaccccggtcagattctaacccgccttggtttatttaaagacacaaactctcatcaacccctggcctgtgaacttgttcacccttccccttctccttacttctcacgctccttccaaaacactccctttctcttttcccttacgacccttcttctgtgtgtgatgatgtagatagagaataaaaagagaccagtgtgcaggaagaaagagattggtcacttcttgtgtggctttgttttgttctgtgtgttggaatttgttgatgggtgaagagggagaagaggtgtcaagagataaggaacaacaacacatgggagtttatggaaatgagtggtcgtttagtagttgctgtgcaaattggcgccgtttaagacaccagaattcctgttccatgcctccttttaagtgaaaaaaagaaacatcaaaacaaaaacgtgttctctctcagcttttcttcttgagatcttaatatacattgactaaaagaaaaataaagggatcaaatttaagttccttgatctaataagatccgtgcttttgtttgtactactcatgaagagacttggcagttcggatactcggggtgctctcatgacgatttgtccaccaacaggttaattgaaaaaattgaaacttcggcttttaactctgtttccatgatgcgtgtttcatgtttgtgccttgtcttgtctcaacttttttcacgatcaaccatcccaattactcaaacctttcctatttttatactaaaattccttattctgttttttttttgtgtgtgtattgcatcacaactcatcatcatgttgaattatgctctgtgttcgtttgtttcaagagacaacaacagttacagttacactaaccatgattatgtcttgatttgaacagacgaacacagtccgaggaacaaccacgtgtatgggaaggagttccagtccatgctggaaggactcgacgaagaaggatgcgtggaagaaccagggcaccactctgagaagaaacgacgactaagcgtggatcaggtgaaggccttggagaagaacttcgaagtagagaacaaactcgaacctgaccgaaaggtgaagctcgcgcaagaactcggcttgcaaccaagacaagttgcggtttggttccagaaccgccgcgccagatggaaaacaaagcaattggaaagagattacggtgtcctcaaagccaattacggatcacttaaacttaactttgacaccctccaacaagacaacgaagccttactcaaagaggtaatttttacactggtagcttaagatgtgtatatatatatatatatatttatatatatatatatatatactattttgatctcatcactggtcgatatgggatcttcaacaagtattgaaagtttgtttgattgttttgttggcagataaaggaattgaaatcgaggctggtgcaagaagagaacgacaacaacactgaaagcgatgtttcggtgaaggaagagatgataaccactctgcaggatagtaacccgctcggtgaagccgccattcctggatcggactcgaaggagttgagttacgagtgtttcaacaagagtgatgaggtgggagggggttctgtattccctgtggatttcaaagatgggtcttctgatagcgactcaagcgcgatcttgaacgaggagaacaacaaccacagccccaacagcaacgcggcgatttcgtcgtgtggggttctgcaaagtcactggcttttgtcgtcgccttcttcttcgtcgatgaacaactgtttccagttccagaaacagtaccagacgtcgacgcagtacgtgaagatggaggagcacaattttctcagcgccgacgaggcctgcaatttcttctctgatgaccaagcaccaactctgcagtggtactgttcagaggaatggagttaagaggaagaagaagaagcttaattaattgagagcattttgcagggtgtatagtaattggatggagagagaaactttgtaaaaatgaaatggtcaaggattgaagaagagagggaaattgaagagcttgagagaaaggagaggggggctgaagcacgcatggcgtggggtcggatatgagaggttgatgacgataaataaaggggggtagtaatcatcatcatcaatctctcggccgtgcgggaaaaggggggtaatttatgaataataataatgattaggtcgtaattaagttctatctagtgagtaatgctgtaaaaaatccacaattcacctctgcttccacctttctttctatctctcaccagttttatcggcttttgtatttttatatctagattaatttcttttatcaaaaatctaagtttttcatattggaattaaatatttatggcattttaaatattatttacatgcggttaactgtttatatattattttttaacacaacttgaattttattttgataacttatattaatatttattgcaaaaacttattttgtaaactatagagagatttttttttattggcatattaaaagtatttaaagaattgtatttgtgatttgactttatttaacttgactttaagttttatgtacactaaatactttaagggcataaatgaattataggactgagaaacaggaaaaatagaaaagtaaaaatgtgttgttgaaatcattttaaatatatagtaaattatacgtaaatattcttaagattttgtgaaattacacatctaatctattttttctactcctgtatatcgtaaaaacatcacattgtgtcattatgttcttctacgagaaaggttgatgtaggctgttttgttatttggggggcaatttttttaagaaattactaatttgagttactttttaaaaaattatccgattaatagtaagttgtgagagtctctcacgactttgtgattaaagtcaagcacattcttactacttctgaaatgtttttgttttcctttttttgtgtagaagtaataaatataggtaccactctcctttattttcataaagtcgttcaaaagattataactttagttttttttcccataaatataggtatgacttctgaagtgtgttcattattcatttatttctactttatagttgtttgtttcatttcatttaagaaaaatattttgttttaaaattttctttataatactatttttaatttatattaaaagtagtgaattattttttatttcaaatattattaattattatttgtgtaaaacagaaggtcataatcatggtaactaaaatatttgaaaacaataaaaaaataaagaactaaaaaaatacaaataataaatgattatattagaaattaaaaaataattcatcacttttttaataaattaaaaatagtattataaagaaaactttaaaacaaaatattaaaaaaacgaaatgaaacaaacaactcttcgataaaaataaatgaataataattactttaaaagtcttacctctatttatgacataaaaataaaaataactaagaaaataaccttttaaacaacttcaaaacataaataagagttgtacttatatatatgacttcaacatggaaaaatataaaaaataaaagcattttagaagtcataagaatgtgttcaattttaatgagaaagtcgtgcatgacaatcatgatttattcctaatcggataattcttcaaaaagccatagtcttttaaacgatttcaaaaaataaatgagttgtacctatattaacgacttaaaaataactaaagtcacaatcttttaaatgacttcaaaaaataaataagagttgtacctatatttactacttctacatgaaaaaaaaaaaaaaaaaaaacatttcagaattcgcaagaacatgttcgactttaaccagagagttgtgtatggcaatcatgacttatccctgattggataatttttcaaaaagtacccccaatgggtaatttctcaaaaaaattgtccctcaatagtaaaaaatccgttgtaaatgttcaaaaaatagaaaaaattcagataaagaaagaatgaatatttaaatattacttttttggtatctatatttataacattttttttagttttatagttaaaaacatctcatattgaactcaatagtcatcatgttttttactattttgatccttgtaatctaaagttgtttaattttatttgcgatgaatgtgaattaaatgggtcatgttatattcgtttaaaatgactttaatcgatacttgataacgataatcaaatgagtaaagaaatgcaacttttggaaccaaaataggatgctctaaactataaagactggaaggaaagtgaaagttaccacaactataaggacaaaaaaataattaaaccaataatggagtgaacaattttgtttattgtttgtttatgagtggaaaaaatagtgaaaaaaataaggatgaaaatatttttgtactaattaaaacatgatattttacccaagtactttccaacataaaattgctagtttaaaaaaatatgggctaaattataattttgatttgtgatttttatcctcctatatttttcatgatttaagttcctatattttacaaattttacaatttcgatctaatcatcaattttgcattcattttttcttttattttgtacattttaatcaattaaattatttctttataatatattaaataaatttgttaggatttgattggactaaaaaaaacatatgcaaaattaacaattggacaaaaatagcatattttctaaaatgcgggacaaaaattttggaaaaaaatagcataacaaataaagataacaaagatgcagatcaagaacgagagagagaccaaaataataatttaataaataaaatttatttgattttattcaaaaataaaaatgaaaaaagaaaaagataatttttcgtatttcaatcctgttgaagaatggtaaataaaaaaataacttcactccttcaatttttttaacttgaaaaaaaaaagtaaaaatctaatacttccattagcatttatttttatttcatttgtatagaaaaagagggaaaagattaagtataattataacattaaggtggttaaatttataatagtttaaagtttattgtacattaatttatattttatcacaatttttagttgttgatctttaaaaatatactatatttaaggggtagtaataacacactttttaattacgcttattttttaattttttattattttgaaagctacaaaatcataagtgaaaatagataaataaagagtgagacccacacacttttatagtttttaataaattttaactgtgaatttaaaaagtatatgttaaataacatgttactagtattttttaatcctttaaagtataacttttacctttagaaaagtctcaatgataaaataaaaagaatgataagttttcactttaacacttgactttgtccttctaggtaaataattattatgtagaaaaaaacaatgatttgtgcttaattattattttagcatgtataatacacaagtttgatatttataataattataataaattagtaaaagagacactttgtggctctctatatttttgtacaaaaaaaggtataattgtgtttttagcaatttatcaattatattttggatttataataaaataatttaatttgtagtgtaaaattaatattaaattaaaattaacaggtagctaaaaaatcatatatatatatatatattgtgtaagcgaaattctgaagttttttttctctctcttgctacgattattgatatggtcaacatttactttttaaactttactatcaaaagattttcaaatgaaatttcagaactaataataggggtgtttgcatttcattttattatctaactaggacccgtgcggatgcacgggtcgcgctccgctacgctccgttaataataaagaattacacaattaattttcaataaataaattaattaacgttattatgatgattataataacaattgaatctaataaaaaaagtttaaaaatttcaatttttcattaaatgtaaatatatatatatatatatatattaaaccatttcatttgacttcaagtatttattggcatgagtcattaggtaaactatatatctaaatatatttgttgtgtcgtagcagggtcattattggacgcacaggtaaattataggtgtagatgaaagtaaaactttgcatgtttttatgctggtaatcgtaacaattgaattaaataaaaagagtttaaaattttcaaatgttatatgatgaaaatttaaaaacaaaaaatatatctaataaaataaatattattgattgtttgatatggaactatgttaaatatttgtaaaaaaactttttttccataatggttcattggttcagtcgtgatgacaattgtaatatttttctatataaaaataataagtaaaagtaaataatattgtgtgtgtgtattacatatatgaaaattggctaatgatgttaaaggattttcttcttaaatttttttctatattcaggtttactcatgaaagctttattagtaataaattatttccttcttaatgctttctttaatatattaatatttaatttgcttagaaccactttgctactgctaacactttttaaaagacattaaataagtttttttaccatgcttctagtgattctacgacttggatcacctgctataacaatatagtaaccaactatcccaaaagtataataacttattattgataggtttaattgtgtttttagcaatttatcaattatattttggatttataataaaataatttaatttgtagtgtaaaattaatattaaattaaaattaacaggtagctaaaaatcatatatatatatatatattgtgtaagcgaaattctgaagttttttttctctctcttgctacgattattgatatggtcaacattcactttttaaactttactatcaaaagattttcaaatgaaatttcagaactaataataggggtgtttgcatttcattttattatctaaagtcttaaaattaataataaagtgttttaaaattagttatcaaaagggactacaatcgaacattaaaaattgtagtgagattaaaagtgcaattcactaaatatgtacatcacataagcatggaaaattaataaataaataaaatactgattttataaggctaatgtttacaaaatattaaaaaaaaagtttgacttttacaaaaaataatatttacattaaaacttttagtttttttttttataaaatttaaattacacacacgaaagagtatcaaattataccaattgttaaaattaagttttaatatcaattgtttatttttttcttatataagaattgaggatgatatttataataatttatacatcctatcctattaaccgagatagaacacttgaccaaactttgttaaagggaataatcatctgtctgggttttatctattttttaaattatttttaaaaatttaaaatacctttgaagtttgaaataaagttgacaaatgtgaattctaaggtgaagaataaaaaagtctgtcacttatgagggaccataaatattcgttaaatatattattaaaaataattttttattggttaatattaattattagtttttgttaaaatatggaagaatttaaattcaaatttcatctctctccttttaactcttaaacctctcataattctaacccatcaagttaattttataaacggctataatacagacgagaatgattcaattatgtcagtaatttaataatatatctaactattgtttttaagccacgtgaataagaaagtatttatttcatccctcaccttaaaattcaccaaaccttttataattgatgaacttcacatctcatgcacaaacaaagctagcggaagagaatttagatgctgatgaaaattatgaagcgaagaatattccgtcaccttcaccaacactactagatgaaagccttggtgacgttttttgctccccacccccactatctttatcagcaacactacaaaggataaactaagttccataagcatctgtaggtagctctagcatcaactactatgtgttatccctcttatccaaccagttttcactacaaacaagtttttttattagaataactatatatgaaaaacgaaaatattaatatattaaagagtttttaaaggaaagcggcaagatttaatttttttttttcaaaatcaagagaaaatatgaaatataaaaacgaaaattcaaaaaacttgtttgaggtttttcattaagttatacagagatagttttttaattttataaacaagattcttggaataaataatttttcaagtgtatccttaatttgcagagcttataattagccaattttgttctatctacttataatgtgaaacttccattacaactgtctcattatatttattagactattatttcattttttaaaaattcactccttttattcattttttatttttaatcttttaatttttattttcaatcattatttttcaaggcaaacaaaaattccaattaatatcttattaattattataaactaaatatactttattatatacattgatcttaaatagaaaataaaaaatataaatttctattatgcattattcttaccctttttataataattttcttatgttctattttattcttgtgaactttaataaaagaatatttaatatttaattaatttttcatttgaccgaaattcctacattaatatgttttagttttatttatacttgcatcatgtcgaccctctcggtcagtacttggttagcctctcttgggaaaggagctcggaaatccgatgatccatgttcatgctatcaattaaacgtcaccaaacccttagcatgcaaacaaccacaaacatacagattataatacgtgtccggaaatattggatcattcaattgtggtatacataagtataatgtatcaatgcaaccaaataggtaaacacatacaacacaatatgaattagattgccttggctggtgctgattagcttgatataggatatcaaatgggtcaatctaacccaactcaacctaatttaatttaccttttaactcattaaaatgaataactaagttgatttatcacataaataaataaatataaacataatattacaatcataaaaactttacaagtttatcttaacacaaatctttttggaaactatcatcctaagttaaataaatgtaaagtaaagtaacaacataacatgaaatttacaacacttcatataatttttttatccaataaattaaatgtttaactaaacagtctataaaaaaatctaaccaaaaaagtatgagtccagcaaatcaatctaactcaatccaataagttccttaactcattagattgataggttatgtgagttaaattatacacattgaatcattcaacccaacgtattttatgggttatttggattgatctattgagttcatcccactttaacattttcaaacttgagacaatgtagttgcaatctcgattattaaaaaaaatatttgttaaatatttaaaatattgattaatttaatataaatctttaaagaccaaaatggtcatcacctatgaatattatattagatatttcaaaactttaaagtgacagtttttttttataattgtatgaactgtagtaatcaataaatcaatattataaatttaaggattacttcgatagagaaggatttgaactactttattattaatcgaaatgttgtccaatttggcatctaagagtcgtgcatgagattttgggagccagtagtactagtaggtatgtttgtgtttcctttacgacctatactaccactttaatcaaatttgatgctaaaaaagaaaaaggcaaaatatgattaaagagaacgtccctaaaaagctgtgccgtatgattggatcggcttcgtaaattaaacatccttcacttttgtgttaaaaggttaaaagctgaaaataaaaataaaaaatcccccaacacagtatttttcgattttctatcaagtaggatcaaagcatacgcatcggggtcaatgcactccttatttaaaagaagaagaattcttaaaataatattatgattatgaaaaaaataaagtaagagaaagcaaccccacgaacagccaataagatgatgcacgacacgtagcctgtgtttgcttcctgaaaatgcaaatcccctttcttttttatattattatattttctcaaggcaaaacaagaaaacaaaacaacatttttattgtggggtgtacggatggagaaatagggatcggcacacttgataaacccgcttgcattgcagggtcgcacatggcaccatcttctctctctgatattctgtgcttaacttttgtgatcgtgcgtacgagtacgtgttctatttcttcttcaaacccattcattgtacacgtgtacggtgatgaggctggtccaccactctgtccaaacggtcccccatcatgaacacgactgcgtgtagtcatggcaccttatttgacaaatacatttaattaagtactttctgaaaccataggtaccaataatcttttcccattcaaaaccggtggaggctaggagaacgaaagagtaactcttgcgtaagttacgaaatatatccataatcgttagatcaacatcatggaatttattgagtaactggtaatcggacagtgttacattattttacttattaatattttaactttttctaatacgcgtgaaagcgacatttgctgacaaaagtcatatgcaacacaacgtgtcatttatgaatcatataagcgtaaaaatctgagaggacaataaatttattcatagaaataaataataatatactgtaaattaaaataaattaaaagaaaatatgttatgccctagaatataaaactgatttaattacgtgatcgtaacacaccagtccttgtgaataataagtttatattgttattttaatagttattaatttatttctagatgaaaaaacaactttttacaaataaatgtataagaaaattgttcaatggacagcataaatatattatgttatattttttcaacaaccacaaagtaattaggccattttattttcatgttaaacgttaacatatttttataaatttcagtcattttgattagttataatactaatttttatctgaaatttaattatatttaaattttttacactttttcaataacatattatataaaaacacaacacattttggcttacacaatttcaatgtgtgatttcaatttaactacacctattaaatatttatataaatttcagtcattttgattagttataatactaatttttatctgaaatttaattatatttgaatttttttacactttttcaagaatatattatataaaaacacaacacattttggcttacacaaattcaatgtgtggtttcgatttaactacacctattaaataaaggtatttaattatttatagttgagttgattaacttattttttgtcttaggaaatcgaaatattgtattatactagtataatactacttatattaacattacatagtaacatttttgtaaaaaataaaataaaatactcgtacataataacatttcaaaactaaagataaatcgaaactaactttcatttttaatttacaacttgttcaaaagaaggataatatgacccttgcattattaagtttaagccacacactaaactacacaccaagcgtgaaattaaggatgtctgtgggtcggttcggattgattttcgtcaaatttatgattcaattcaataaaatttaaatttggtttggtttgatttttagaaatttttgtaaaaacccaacctaacccaacccattcatgaatagttcggttcaattcaggccaacgggttatccatttaaatttgatattttttgttttagaattactattttatatcatgattcatccaaatatccaatataattaaataagcctaacactggtttgtcgcacttttttcactttcgaggactacaatttgaatttctaacttttgaggacgaatttatcagtgttctacacattcagagatgaaaatgactatttacactaacataatattatcaaatgtctgaaattagtaaatttgattcatttaataccattaacataatattctaaaatagactaaaacaaattaaaacaaatatcttttaatgacattatctataatagtctgaatcaacaactatttcctacaaattaatttcttactataaaacattgatgaaatcagatttgttataaccagatttgctgaaacaaatgaacaaaatatgatccattaatattataaacatttgcagtttcaacacttggagcctaatattaacagtatttaacaaaaccaaacaactctaattttttttatcatttttgatcgatttaatttgatttcgatcagatctataaatctaaacctgtgacccaaactgtacatgaacagttttgatcagttcgattcgattttgatctaaatgcataaatgacccaacgcaaactatccgaatcgatttagaccaatttagatttgcaagtgatctatacatggtaacactcctaggtaaaccacatgcaccattgattcatgatttatcatcatgacagtgccatttctttcgtaatctccttgaggctcactagggaactaccacaacaccccccatactgtgaaatatctgtcgacatagtgaaccaacaaaatattcaattacgatttgattaattaaatcaatttttttaaagattttatgttgacagatagggatggaaataggctaggctttgacaggcttgagcctaacatgcataaaagtctagcctgacctgaaagcctgtatacaaagcttgatgaaataaaaaataattaaaaataaaaaattaatgtaatactgatgctcatcgacaacacctgcctcgaactgaagcccaaaacgtggtcctacaagtttaactactccatggtaaatgtccaaactaatggagctgacttgtggtacacttgatttgatagggatttgagtgttgctggtagagtcattctatgaagtagacataattcttatgtgcataagcttgtcaaaatcaataaacctattttactcattctcacactcgtcattcatcttcactagtatatatatattatatactttatgtcattcatcatacactatatgattgttaataagaaaaaatatttttagaaaaataaatatattgtttttaagttttaatatatatatatatatatatatatatatatatatatattaaataggctagcctgataggtctaataagttttttttttaaacttgagtctgacctttttatttaaataagcttttcaaaaaagccttagtctgtcatttataataaataagtcaggctaaatcagaccttatataggcaaggtcgaaggtcctctaacccatttccacccctattgacatatttagaaaaaaaaaaactaactcctcatgtttgttttaggaaacctcatgttaaattaaataatatatttttatataaaaatataaattcatttttatatgcataattattttataaaaaatactattaattattcctaagagtttaactttagtgaaaagatgtttgctaatattaccgttaataaaacaaattatgtttagttgtgtcttataattcatttttataagttggtaaaaaaagttattttataaaaatactagtatcaattattcctagcaaactttgtgaaaagatgcttgctaatattaacgttataattttttaaatttaattatgtattataattgaaaatattattttagtcattttagtttgatattaaaataaaaaatacgtattaataatatatttttagcataaaccttaacatttcgtgtaaaaagttcttaacacatttttaatataattttttcattaattttaattcataaaagttattattaaaaatcacattatttaataaatgtttcacaaatttatttaacaatagaaacatattaaatatgcatactatgcataattattttggtagacagatgataacatattttctcttaatttattttaatttatagtatattattatttatttctatgaataaatttattgtcttctcagatgtcgctttcatgcgtattagaaaaagttaaaatattaataaataaaacattgtaacatttactgaataaattccacaatgttgatctaacggctatagatgtatttactctttggtatcctagcctccaccaaaaaccaaaccaaaactggaacaaccatcgggaattagatctagtagaaacgtacctcaaacaaaactgtttctaaaaaagaaaacatgtgaaaaataaaaaaatcaaacagtagaaatagcgggtaatgcagtttgttcatttttttttccttagctatataccatcatgtgttaatatataattcccgaggaaaccaataaagagtgatgcggtgatacggggaaacactgttttgttttccttggcctttgagaaattccaaacagcaattcggaaagggtcccagtccaagttggagggatgggacgctatttttttgtctggtgactttaaatttgtagtttatcgtaatgacatagatattatattagtatgtggatgcattcttttttctatcagactgtggaaaacacgagcagattccattggaagccttgctgatccttgatttcccaatacccattggaatggttgtgttataatttctaataattcggagttaggagggataaattgggccagatagagaaaagaaatgcggtacccccgaggaaaacaaagaaaatatttttaaaaaaaaggaaatgagagtggtcccctacatggaagtgggtcccatggcgcccctagctttggttcctgtgttggtagagccatgtgatgtgggtcccactcccgtgctgcatcaaacatgtccatttcaaaggggtcaccgtcacttaaaaattgcaccaaagctggaagctggacgacgagaatgtgtacagtgttccttctttgtacgccacgattgctcacagctcatctacctaataaacttggcatctctaaagactcagatttttgttttctttcatttttcattttttttcaaaagcaaaaaagttgaagtagaaaatatgggattagccaagcactccaaaaacttgattcattttcaataattaaaatatatgtttaaattaatttaatctagttactcatattatctagcaaaactttaagtacaggggagaaactggttttttttacatctccctaatgttcttttacctttgctttacccttcatcttattatttcaaaactaaattagacaattaacatgttattctattcttgtttcaccctcttaatagattctctcaagataagaatatgcaagtgaaaatgtgaaatttggggtaactaaataccttgacacgtgcggttctcaaatttgtaaacatgaaaaactaacatcggtttttctagaccttcaatttgttattccctctaaaaacttttgtggaatgttcgatttagcttctatatattactattctcttcacggttataatctacttccatgccagccatgtttatgcatcaatatttttcatccaaataatataatattttcaatgttctatcttcatcgtaacatacgagaaacatgaaacatgtgatggcatgtgaaatggtaagattgtagtagcaatttgtttcagaatacataacattaatttattaggaatctgacaattacttcaaatcttcaatgtcattccatatttgtttaaccttccaatcctattcctttttactattattattattattattattattattattattattattcaatcctattcccttaaatcttgattggggataatatcttacatttcaactcctttgtgtttcccaatttgatcatatcaaaactagggcaattgtctcgttctattactaaactatcatatgtcccatattttaaattaggtgattacccaatctctcatcccattcttccatttttttttaatcgttgatctatatagggacaatggttattttagtctctataatttgaatacatatcactatgtaaaattggactgatgcgatgaggttatactttatttatcacgtaatcttttaatgaagtttatctaatgatgaggattaaaagaaaaggagtttaataaatatacaccatcagtaaaaaaaacttatattgtcaaacaattaaaaataagctttagtaagatttttaggatgaaaatgacctatttctgtgttttgtttaagttacaagtatcatcaattagaaataattttattcgagtcaaaaaaattattatggttaacaaaactctccctccaaatatatcacacaactatatattcagacttgaatctaagatttctgattaagctcaaacaatctcatgttagttgatttacatttaaataagaaacaaaagaagaagaaaaaattatcctaattataagaaactgatatgtgaccattttaagtgtattaattgttaactttttttttactcttaataattgtgaaatttattaattatagagactcatatcacatgaaactagacacatttattaagttattaacaaaacaagacaaactcattggtgaaaaatttatcttttgaaatataatcatcacttaaactatttaataatatggctagttttgaaaaaattcaaatttttttatattattaattaaaattaaacaatttaaccacttttatttcttatatacaagatcatatatagtattaaacaaacttaccataaataatattttatgataaaatgatagtgtaaaaaaactttacagtattgttattatatatattattttttctaaaaaaaaacaaaatatccaaattataggaaataaaaatgtcttttaagtgtccattaaaagataaaattgattaagtgatagaattgtatttattagtataatttttgtttaataaaaacaaaattattaagatgaactttgaaagtcagtactaacaacatgtattatattaatattctatatcaaaaaaattatttgttagttttttatccgtaaatagaaaattatatttatagtagattcaaggagtgcgaaaaatacatacagaaagagcacattaatacaccatgctataatatattatgctatttataaaaagaaaatataatgtttacattgatactttatctttcattgtaaaaattatgtcaataacattaatttaatactaaattcttaataaatgataattttttacccatataaaacatttctcttgtgtgttcatatactgtggccacacgctcaacggaagcagttggtgatgtattatttaattacttaatgatgtgaagctaactaggaacatagatgtgttgggagttgaacattaacggataagaaaatgactgccaaaaagctctttccgtgggtgcacaattttcatactcacgacctctgcagcttttttatacaagagttgttgctcaatcatgaattagatgatgacaatcagcgaaaaaagaagaacaagaaagaatttcatgcatgatgacaagagtgggaacctctggatgtctgttcgacagagttagagactaggatgaaaaaaaaaaaaacgcatatatctgcaaataaagcaggtgaattttttttaccaaggttataaacgaagcgagcatgagtattaaagtaactatatcagtgacggagttaaattattaatttatcattgtgtattaacatatttcttttaattttatttatttcattcttatttctaataaaaatttgtaggatcgcccagcaaaatccttaattggatgcctatggtcgtttttgttaagaatcaagaacatcaattattttttaatgaatatacatacttacttttattgtagtttccttgaccatcatgaatttcacattggataaggttatagatttataaacatcttcaacgtatgatatcaatattcttattgtatgtgattttctaaattgttcagatgcttataattttgtgtttacaccaatggtcgtaagcactatttattattgatatttttgtgattaaaataattaatgacctatgttataagcacacttactcgtgtgcattatattcaggtcacttgacatttattgatacaatgttatctagtaaccaaagatttaattatttaaaatagctagcattaatgtaatatatctactaattttgtaataattaatatttatttagaatctaattgattaataagaatttttttataactatattttttttaagattcaaactcgaggcaacacttaaaaaattcaagtctaatgttagtcaaactagttatatgttactcggttaataaaagatttaaaattccatgtattattttcatatatatatatatataaatacatatatcctaattttttatttatttcatcctcattccttggtcctcactctcggtaactttgaaattctgattgaaaaataaaaataaaaaatgaaaaaaaattatcaacacattccatcatacttttcaatacaatccaaccatgattactaataaatgtatattcattaatttattaagatctgtatccttaaagcactaattaaaacgtatctcttcttattaatatagtaaattttatgaaaaaaaatgtaaaaaaaattactaatgactgagtcatgtaaaaatttaatataaaaggaatttattctataacgcacattttttgtgtacttagtttgttgaattttttaataataatcaattcgagcttattcacattattctttttacagcagcttattcacattcttaaaattcgacgagtatctattcatacatcttaaataaaacccacccaaaaagaagaaaaaaatgacaaaataaacatagttgaaattgaaacattgtataggaaagacgttcagactgcccaacaaatacaggcaagattaattagaatatcatttgcaacaaggtacggctacgtcttagtttatgattgattttgaaggtaatatgactgtaaaatatatgttatttttacttgaaatttgaaaacttgaaatatgttaagcaccatcaaatcttccatatccttacgtttctgcttacataataaaaataattttattaatcaataacagcattttatactgattttaagtagtttaaattatttttattaaaaatgcttattatataaaaaaatgataataaaattataattttttagctgacataataaaattattttaagtacttaaaattagtccttatagtattatgcggtaatattaatattattaggctttgatgtaagatgatgtgtctagttagaggttggtcatggctattgagtaagactaccgctcagctataatatttctttatctatccttttctttctgggcccagtagtggttgtggatgtacattttaatgtccattatctgtgcaaacttctagatcaaatgctaacacgaactagtcataaaatcggcgcaacggccgaatattatactatgacaaaattaataattcttaactgtaggttaagtttcatctaagaagacagattaatctcgtcaacaaagttattggggatctaacaacaacgatgaaaaataataaaaaataaaaatgagagggaatatgaaacatccagaaaggaactcaagccaagaggtagggagaggatagctttctgtctctttacgcaccatggaaggtttttttagtgtatgttgtagttgttaatacagaaaaaatatttagttaaatggagtaattagctaaaaattgaggactgacaggtatgttaaaaataattatagttaagttcctgtttagattagtttctccacaaccgtttataagagaagaaaattaaaaataaaataaaataaacttctctcataaactaaaaccaacatctaagttaaagtcttgatcctaaaaaaagaagttaaaatcaactttttgaagaagttaaaatcatttattttctctgaaaaaaatattttaatttttcacaagcaaattttaatttataaaaaatacttttattttttattttcttaaaaaaaatgacaaatttccttgatgtggccatttggaatgtaagatgtctcagttattggctcattgcagaaaattaagtagttaaccaagtatattgatggaaacaattgcataagtgactctacattaggaaaaaatatcaaagggaaagatggtagcttttttttataattattattgttaacaattaaggtttatactttggacctaattaaagaatcaactaaatatataagtgaaatctgagcagttagattgtgttattattgcaattttagttagaatttatctagccttatgcttggttggcctgaatgtccctcataacttgagaatcttcttgtatactccatcaaagtttatgtagacgtaaagtatgacataaaacacaatgcattaacaacatatatacattgtaattaaagggtttcatcttagaggcactctcatacatcatcacgcaagaagaaatattaccttgacccataaggagctttgtaagaaagcctaacagacctaaagagcgacacatatttaaattctacacatttgaacagcaaagtccttacaagtattgcaaagtattccaatggagtttggctcgtaaatgacacgaggttcctaaatctacctcgaatatccctcttgttttgtccgctacgaacagatatccaacaataatgttggacaattgatatatgatcaaactttctctttctctgaggacgtcaatggtagtaaaatacctaagggaaaaagattacaatgctcacaagaggaaacaccacaattggacgtgagatgtgtgtactgtgtgtaaggaaaagagagtcagaatgtatgtaccttactccattggaagtgctcatatttataatcattcacgtggaaatcagttagaagagattacccgcaaacagggctggccctggggcaaggcgagcagggcgtccgcccagagcccaaattcttttgtacaggtagtttaagtaaaatttatttttaaaaaaaaataaaataaaaacaaaatctatgttaagaattcattttatgtgttaggggtcaattttttccatctcttagttttaatattatttgtatttcaaaaaatttgtgtattagaggctcattttttccatcccttagttttattattatttgtatttcaaaaaatttatgtgtcaggtgtaacatcccgggcgctgacgagggcggggagtgatcgccggtgcagtgaggcacggacaaggagcggctcctggcaggctttcagcgggaggggtacatgaatgaatcaaatacacacccgaacgagagggatccagaggctgtgcaggtatgggactgtacagttgaggataacttaaaggatttaataggtactacctataccaacaaggtgcatctacttttcggtaacccataacataagaactccacagttaagcgtgcttgacttggagcaatcttgggatgggtgacctcctgggaagtttctcaggaagtgtgtgagtgaggacaaagcataccgagaatcccaaaaagttggtgatcatggctttggactattattgccacattctcattactagaactatttgagagaatagtctaagtcttgttgaatctcttatgacttggcccattccaaacatccgtaacacctctccttcaattgataagaattgtttttcttttaatctaaatttgtagtatttcaatcaaaatttaaaaatttaaaggtataatggaaaattagttttaattttaaaattaatatcaaattttaacaaaaggtccaaaagtcattctcgattccttctcactcttgaaacaaatttgaaatttctgtatttcaagtagttaacaataatagcaacagttgcattaaccatcgatgatgaaggtgttaacaatctcactcaatagtaaacaaaggtaatacttcttcaatttcattataattatcgttttagattgtgttatatatactaaaaaaattaataaatgaataaaatagaataataattttacaaaattaacgttattattatgtcgttagcaaaaggtctttaatctcttctatgtttggtaaccaaaatagccactgcaatcataatcgtaattcagtccctgagttggaaaaattaaaattatttacacattaataattatttgagaaactatttttatagttactactttataattgaattaaatataaaccaaaaaataaagtaatcaaattttgagaaactatttttataattaccactttatctatttttctttgacattatgcaaaagaaagacaataatatattttgcattttattattttttattttctcaaatactatttacttaattcaattcatcccatgaaactaatctaacaattaaaacttagcccaaaatgacttataaattttggcaaaacatacccatatccatgagcaaaagctacgcaattcattgtttcatcttgataaactatcatgaatactttcatatggttaaaagaaatctacaaaagcacctctttttgttagaataggtgtttaagtaaatcaagaatatcaatgtcaatctaaacgctatagttgttcataatttcaggttctctaaaacctgcaaaagaataagaactataaaaatatcacgtagtaattatttcagaacatatcaaattacctcaaatcaaatcaaaatataaaaataaacacaattttaatccaagttaattgaaattggtgatagatgaacctaatgataaatacgaagaggttaaaaaagaaaaatggaaactaagataaaagaaaagaaaagaagataaaagcaaatgagggggaaaaaagagggggagatgaagaagaaaacaactaaaaagggatcatatgcaacatcaagataacaacgggtctaacccttattcaaatttatagtttttcttcatttcgtcctaagacacactgtccgccaatctacatcccactatatggatcgtctcattacgtgtctaaaccaccttaatctatgttccctcatcttttcactcatcggtactattgttacaattcatcaaatatctttatttcctatcttatccatcttcgtatgattacacatccaccttaatatcttaatttctgctacccctattttatgatcatattgcttatgttttcgtcaacattcagcttcatataacattgtacagttgttctatagaactttctttttagcttaagagaaattttgaagtcacacaataacctagatgcattccgtcattttatctaccatactctgattctatgatttacatcttactcaatctcttcacttttttgcaaaattgatctcagatgtcttaaaacatcttttttgggtaccccttgaccaattagatgtacgatatattgattacatctgttacgtgaaaattcaaacttcatatactcggtctttctttcgcttcaaagtgttttttcataattctagtttcctattaacacaatctttgatctcgttagtgagcacaatatcatctgtaaaaaatatataccacgacacttcttcttaaatatcttttgttagttcatctatcactaaggcaaaaagatacaaactaagagtcaaaccttgatttacacctattgtgataaaaaataacttattttccatcctctttatttgttatttttaaatcaaaatatagaaaatggaaacaaagttaaaatcacccaaaaaaaataaaattaacacataattattactgatgagagtcagattttcccataactagttgcgagactcgtttacatagttgaaaaatattgatagaaaagagaaaagggaacctgttagtcaatctacagagttcacaaaaattgagaaaaaaaataaaataaaataaattgaacttttatcatacactaatatcaatttatcatttcaagtttttaagaggttagtgagagtttctataaaacttaaagtacttaaattaattttaatttatgtgagaaactcaatttatttgtttaagtaaacttggatagcttcacttgatctataatttgaggtgagttaacttggatgagttaagtcaacctgtgttaatatttaaaaaaaaaaaaatatatttcccttttttttgttattttattgttctggttggtaacaatggtttttaattaagttcatcgttagtaaattagtatgttgttggcttgttgtatttatgatatatatatatatatatattgtattttcattttttaaaattgggtaaatattttaaatttataacatgattaaaaaaatataaaaatacagcaaataataagaagaaataaaaatgaccatattaatgatacgttacgaatttactcaataattacatacaaaaaatattgcagatgtataagacatagtatataacaattatatattatgtatgtatattaaaaaatgttatatatatatatattaaaaatataattttttttaatatgcataatatgtaacaaatattatttaaattttagttgcttgcattttaacagaaagtgtaagggaaaagaaagaaaatactgggcttttatatattttctctatttaattacacttgtgttaaggatctcaaattcgaatacactacatgatatttaagtctttggactcttctacttaatggattaatattttgaattagactctccttttatgtttaaattctaaaaattgattttttcattatgagttggatcatgtaaaagattgcttatagactaaattaaggtacaaattgaatactaatagatgagtaaagtcgtcaaaaccaaataactaccaccatattaatattaatgtcgataaaataaaagtcaccataaacatcatctcttaaaggaatgataatgttaaaagtctcatgttaaaacaataaatataaaatatattacttaatatgatacttaagatttgagattttcttacctaataaactatttttttggttggattctccttttatgattaagtcctgacaacttgtaatttgaacttcaggcaatccaagtatttttctacacaactcatgcatgaaaaagacttcccatttttcttttgtttctttcggcagatttttaattaccagggtaatactttttttttatgttatagcgaccccatttccaacttttttaaaattttggagtttggtacgtgtcttatatcggggtggggacatggcgttgaaaagcaatgcaaatgcaagaatatacttatttatataagagagagaaggcactaatgaagctatattggaaaataataatttcgttatcaccattaaatttcacttacgtccctatctgcccatctttttattattggcgctgctgctaaatagcatccgagccaagtatgcttcgtctggcttggctaataatctggctttgaattagtgggctatatgttaatcatgagtactgactaagagaagtgatttatttaatgcatgaacgtttgcacgataaaatgttgggggtaggggaggtaacaatatcttaaatatacagcgttatttaattttatttcaaaaattatgtgtatcaaaaatcattaattaaaagaatactagctttgatacataataatattccaaaataatcattagagacattagtcaccagtctcttcttaaactgaaaggatactttgtaaaaaaaactttcattatttatataaaaaaaatctgtatttaaaagctatatactgaaataattaaaaatgtgttcccgtgtacccttatcaagaaattatagtaatatattttttgacatgttttctaaagttttttcttattatttaacgaaattaatatatatcttatcagataatatgcatattaactaattttcatacaataataaagaatatattataaataacatgttagaagattaacatttccctatttttcttacaaacacaagttttttctgaggtaattaccaaattaatttcttactattgttctagccaaacctttttaaaaataacttatagacgactattcacaacaacaacgtaaaaaaaatcttggcaagtgaaactagactaaaaatttcttgtgagtttaagtcttataaatataaaaatatactttaaaaaaatattttacatcaattaagttaattaagttttgtagataaatattgataaatttttatctatagacttttcattttgcatttataacatgataacaagaaactataatgaatcaatagtatcacatgtttttatttatttattgagtatcacatggtaatagtaacactttacacattccaaaaaaatagtttgttaattactgttattattttcatttaaaaaaaaaaactcttttaatgtttattcctttcattcacttaacacaaattgaatactttatttgagaaaaaaaataattacctgatcactttgatcaacaattagctgtgtcatcttagttgcgtgtttaaatttctgctaaataaataaataaaaactataaatcacatgaaaaatattcaaatgtttcctagagtatgaacttcgtatttggcagcgatgtaatatatgtctggaaaaaaaatagttaagaaacataagagtacaattttaagtgctgaaaatatttttcatattggaataagaattaaatactagattttgtgctttctcaacagatatcgtcccatactttactggattgataattcatacccagtagttgtcatcatctaggctggaataaaaaaattaaaacaaggagtttgaacaaattctaaagtgatcatagagaacaacagattgtagtcatcaaacctgccgacacatagcaatagtgtgcacatgtttggtttggaggaagaatacagaagtgaacataaacaaacttggcaacccaaaaattaaaataatgaaaagcaagccgatacatgaaagacgcacttcctcgatttgtgcaatgtctgcactttgtggttaaacctaaaacgacatttttcgcgcaaaatataatgcatgcaacaaacagctatgtgtgccaagtgtgtcaaaaacaaaagctatctggtcagtaccttccgcgtcaattgttctctttttgttcttgtatatatttttcttgatcttcttttgtttgataagaatgctaaattcaacaagaagacgataaaatgaactgtttgtgagcttgcagtgtggcgcacaagtttttacattattttgagtcccctaaaggaagatcatataacaatattttttatatctagaagagggattggtataacaaaacgcttaagagagacctggtgggacgaaatctcaaaattaagaggttaatttactataggattaaaaaacggtgggatatcaatcgagtgtattgaagataaagttcaggaggatccgtgtaatttatttatgttttaaatttcaacattgctatatgttacaatagtttttggaatcacgtgtttataggttatatataaaaaaaatgtacaaatattatttctcattcattttgtggtccggaataaatagaactatatagtccatgaaaagattttttattattataaccagagatgagcctggcaacattttgtcatggcaagacagcaacgtctcaaaaatttgaacagtttactcgtagtttagtgaaatatagtttggttaaagtttttacatattcctctcgtgattctatttatagttcagcgtctaaaatcaagagctgaggctctgagccaacactgctaactagaccttatttaaagttttaaattattattaaacatctcaaatttagcataaaacttaagcttcttgtgtgaagccatagccaatatagttctaaacagtattggcacaatggcactgatcagtgcgtgatgacgtcttaggtaaaaacagaccgaaggattatgagaaagggccatgccttggcccatccatcgagatattttctttaattatttatttgtgactatgtttataaaatcttttatttattcaccaaaaaaaaatatttataaaatcttcacgttttagtttctgcgtctagaaactgttcgttttaattcttacacatatatttggtaattcgttttagtctctataattttagataaccaacaaaaacaaattttaaaatgtgtgtatgaattaagatgagtaatttttaagtataaggattaaaatataaaaattatataagtataagaattaaatgactaattaaaccaagaattttcacatacaccttgaataatatacttaaaatactataaacaccctttcttgaaaattttgatttaaaacacaaattaaagaaaaatactataatttttaaaacattataactgtaagtttcatgaaactaaagttataatattttttccttaacccttcattagttcatgaggagaaataaaattttgactaatctagaattcaattaggaaataagtaaaatttgattaataattatttttgataagaattaaatttgactactacataagtgattcaatcttaattttaacatattaattacttctacacaattacttggtttaaagttataatatttagtaatacaatttaaatcaaaatttaattgtgagtgtagtactctgatttatttgagattttttcatctggaaggtcataaaggttgctcttttaggtaaggcccataaagaaagtagctctcagctgggtggtagggacaagtgggcccaacatataataacggggcaaaatagggccccattgataggcactaagatctataatgtgatagcttgatagcaagatactttgtcttaattggagactggagtattgcattagaattcatgataaattaaattttaataatgttcattacttatgataacttagattttttgaagtaaaaaaaaaaaagatagtgtagattataaatattttaccgcatacaaatatcataatgaactggagtatacgtaacatttctttggataatgtcatgaatgaactatgaacaaattatataaataaatttcatatatctatttcaaaatgttatatattaatgctttgtttgatttaagaaacaaagaaaaagagtaaaataaaatagtttttagattgtttggtaagagagaaaaaaaaagaaaaaaaaagggatactttttcttatgttattgtgaataaaataaaaagaaaaaacatgtataataaaaaagggatacttttacatttttatttcagaaaagctaccttctccaacttttcttttccaaaatggatggattataaaatagttagacccacttacttttttgggtttctttccttccttgacaaaacgtcatagtggaaagattcattttttttcccggtccctttccgtttttcttccagattaacattaaacagccgtttggtagttaatatattataagataaaataggatatattttatcttatcatgttttgataagttttttattgtatcaataggatataataattttatcttattttctatcttaccttgtaagtctaataatattttttttatttgagatacggaacctgacatgcgttaaaaagttaaaggatatgataaaacttgtcacaatataatatatacaataatatatagtatataatatacatattaatatatatatatatattataaaattatattgcatatttataataattttaatatattttttgatcggtaaatgttagcattagaaaatttattatgtaagtagaaaaatttgaattcataaccttcttacaactccaatttttatttccctcccccaaccatcaaagaaacttacgtacttacataataatttcaacatgtaaatttaaagtatatttttaattaagattaaaaagttaaataattttattcaaatatttgaataataattgaaatcttaaaaatgtgattcaaatatttttttaatcttaagaaaataactacataataaaaaatattttttaaattgaaattttttaaaaattaaaataaattgagagttactttttaaaaagttatattctaatgaaataataattttatcatttgaacataatttatacttcatcatattatctagtctgtattaaataggcaagataattcaataaagttatcttatttattaattgctatgtactattagatataattaaagtttatcttatcttaatcttaatgtatgatgttcttgtgctttcatatcttaatctattttattatatttttacctccaaatgaatcttgtataggtcgttttcacttatatattattaagcttattcatatttttctaatgctataatattctacctatacttatcattctaacactatacacaaccatgttttctgatcatactttgttttgttttcttttttctcaaaaaaaaaaaaagttatatgtgtttttaaagaaggggtcatgtatactccttttggtattagctgttagatatgttggaaaagaaatgaataatattgattgatcatatttaacctggttttccctaaatactaatagatctcaaactaaaccaaatttgccacttaggtcaagaaacctttcgagcacacatcaaaatggacatgtggcagtgttattaaactggcaatttagttgtggttaccgtcatccgatgcaaacataaattattatgataggcattgattattgacatgatataattaaagatgtccttcctttctacatgtgatcagtaatctaattattaatatccattaactcagtagtttttactaataatggaagtgattccacttacatggatgggtcaatatttggttgcgattaattttgaaaaactaatcataattttcaacaaattgacaaatatataaacaattatttttctaaaacaaggataaaaaaattgtttttctaagacaagttgactaactgcagctgaaactaggaagcagtttatttaaaagcacgtgaattaactaacataagattattttaattaaatcagaagtttggaatcgaatcttaactatataattatattaaatattttaaaaaaaattatcacttataattaataactatatttgcctatatgtaggattcagtttctgcagccagaaatttgctggatgcgtgattgggcttaagaatcccatagccaaacttccacacccaaggtgcaccagcccctaggtcgtttttagccgttatgggttaagcaaggacaattaaacgcattcctaaaaatatttctgcatgtttatattttaaacaaaatttaaaaaatatctgataaataacattagtttaatatgtttaattaaatactcctgcatgttattattataacgtgtaatttaactaaactcattatcgttaaaaaagttatttaatttagttgaaaacattaaatttatcttaagttaatattttttcaaaattattcctgtgaacataacaaattaatgagttatgcttttttattatcacactattttaggattgaatttaatgatattttttggaaaaaaataaacaatgcaaaaaaaatatattttagattagaccttatgaaaaagattaaatcgcacttttaacttcaaccttataatattaatagtaactggagtgagtattttttttattctgaaaaataaaatttctcatatgatgatgcctttttttcccctttccataaagaaggtttgacatctatttgcccttttattctctccattaattgaaaactaaaattagttatcagaagtatttaattttaataaattttctttattaattttaaaagatttatattttagaactcgttttatacttagacagacgttagaatggcaattgattaaaaatattacataaattatttagaaatataattttatacttttccttttaaaaaatacactgccgaagtaacatctataagtcccactttacaagttcatcaatcactaacaagtaacaacattctttttttaaaaaaaagtaacaacataccctccatcaacaatcgtaatgggaagatgatgaattgggtcgaaatttatgggattttaaggttattgtgtgacttttgttttatcattttatgtttgggttttatcctatgtggggtttgtatgttcgtcggtgactacaaaatttccataagcggcggcgctgaggaggttgaagttgaactatggcccaggaagatagctactcccatctgtttcttgcaagacatgaatgacaagttgaaaaatagacccaaggataaaactaccaaataataatattagatgtatggctaaaacataattaagcatataaaatattaagacttgttgttatgtaaggtgacgtccattaaagatgcatggatgcttatcttggacaggacttcgaaggtgcatgttaattaaaaagagtctaggtgcaaggaggctgagtctcactgtccagatgaacatggttggtgggaagtatcaagtagaccccagaactatatagagagcgtcttattaagtcacatctaaacgttacatgagagaggtcatgaaagtgaaatgcgaaaaaataaaaaaagcaagaatgacttttcaatccacccaatactttctacatccaatagggattagaaaattggttatttttctttatgttccaagtatttggatacagcatgctattggtagttattgatctctatcacactttacgtcaaaaaattttatagatatttttttttagaccttgacaatttattctaattgcttctaaaatcaatgaacattgaaataaatatgaaactttttaatgtgttttgttctcatttgcacacttcttaagaaactttttagaaaattatttatctcataattactttaacctaaacacgcttatttatgaaatttttaagtaataaattatcgaaaaatagatacatcttatggatataagtatgtattaccgattaatttgttaagtcataatcaattgtacagtttcatacctatgtacacagtctttgaatctttatcaatatgatgtaattcgtccaacatattacacaaatcataatttagtagagaattaaacattaaattctatttttcatatctaattcttaaataagcattatgtcatgaggtcagagcaataatcgtaagtttctaataaaagacatttgtctcttatatgacaaattaaaatttgaatttctagaaatcaaaaactctatacacgtttaatgtcatacaatatctcaagtaaaaatatcttcaaactaaaatatgtgatatattagcttcctcttgtgtaataagaatgtatttaggttttttttcatcatgtcaatttaattttaaaataaataaagtaattagacaaaaatgattaatgtgttaaaattaaaattgaattgtttgtatattatatgaatttgattcttagtaaaaataatttttttgtcaaattttacttattttttgatcgaatttcagattaatgaagatttattttcgtcataaataagagagctaaagactgaaaatttaatttaaaataaaataatatttttaattataatttcaaatcacagctaaaagatctaagcatcgaatcagcggtgagaacatcttttgatttatatactgacatggtgatgatattctcgtcatgcggtagttttggttattcaggttccttgtgaaatttggctctaacttatcggccacgcacggtgactgaaaagattctaatgtcagcagagcacgtcgttttcttatgttggcccacctcttttcttttgatctgtgtctgttcactgtccactgtccacacactcaaaccctacgcccctggatttctctgtattattttttactttcaggtcaggtcaacattgagaaggctggagtagtattggcccattggattggatcccaccaacttaacggacttttcagccaagctcaaacgctagatagacccaacccaacatttctaattgcctattacttggactcaaaaacatgcatgcattttccttatatttgtccctatttcattttcctcgttattatattactgtatttttaagaaataaatgttacttttacaccattcttttcacaactcttatactttaggagagaaaaaaaatctaacaatttaagagaaaaataagaaagaaatgtatgataagaagaatagtgtgataaacaataaaaagaaaaaagaattgtagatttttttaatttaatttgttttaagtaaacattgttctatttttaatgacatttgattttgacagttactgtgaatgaaatgttaatttctaatttttattagagtgaggtgcactttttaaaaaaagtgtaataatttttgttaattgtaaaataagttattaagattataataaattatatgcagtgttagaaattaatttgcatctttaggtaattgcagttcaaattctatactttaattttttagctggtggtatcatgttatgcgcaaactgttaaacaattaatttcgatattataaatatggcatacccaaaaagttaggaccattctccctttagttaatacaacaagatcaagatagtgtagttgggttattaattagtaagcatttactcaaaactaaggcaaccagacagatttttgaccattgaccaaggatctgttatgaattgctatctatcacgtaagccactcttgaacaaattaataatttgtgtcgttctcttggaacatatcctgtgaagataatccattcccgtgaggctttcaagatgaggacactgaaatgtactttacattagcaaaagtatagtttggaagcttcgtattagtttgaaaggcaacattcaagggaaaatgtggtgtagccagctttaaaaagttcagtgattaagctgatatgacaactgaataaccttgtatcattttaaatagactttattcaaagtactctgatggaggaaaaattattaattggtcctggattataatgatttttattaatttttgcatagcatgtaatcaaatgttattattattttataaattaaaaaacttacatatatactatttaagtagaaattaattgagatcaaaggcaagtggtgatctgaactatctaataactaggaaggagctgcatgttcaatatccgccataggattatcatatcataaaggtttaatataagaaaggtcgtttctataaaggttttgccttttctccctgaaataaaaaaggttttgctttaggttcctagagttcttagaggaggcccgcattatgacattcgaagagcccatcaggcccaccctctttatgggtcctcaaaagcatatctttgaacctctaacaaccaaaaatatatacataacggccccattattttgtcatttgttgcaaatatttaaacactgagccatagctgaaatttaaaaaaacatcgaatggtttatttttctcaaagacacaattagctactcataggaaactgtttttttttccaatatggaataccaaatttatataataaaccatttcttgtatttcttatatctattttttattaaaatttattcttcaatatgaaatacaaaatttatatagtaaaaaatattaggtaaaaaaattaaaccgattcttcataattaatagacttacacaaaatataataataataataataatagtaataagacccaatttagatagtgaaaccataaaaaaacagcgtagtcatatcataaatatttacttatacaagttatatatttattttataaacaaaatcttgtgtacttataagttccacttgaagtagattgaattaactttcaaattttaatatgaaatttaatttagtcctctttttaaaaataataattcaatctttattttctatgaatttaataattttattatttacattgaattgaataaatttacggaaacctagtattttcaacatccctattctatacattgacagttttctcttttcttttcttttttatattttgcggtaagcagtgtttcgaatttcgatcgccaaaatgggcttttacgtcaatatgtctccttccttgaccatttcaataaacgagaatatcctgatgtgcaggttcattgcttagcaatctaatctatcatcgtaatgtaattttaaaaaattatataagacactttttcttatcttatttataagacaaagaaacacgcttattaaaaaaatagttaagttaattaaattatgtgaattttaattaaaaaataaactcttttttctaaatcattctttgattgaaatttaatatcaaacataaataagacaaaaataattaaaatatacttatatttaggattaaaatacactgtttttttaaaataaatgagatcggatggagtaaacttcaaaaataatattaaccagtatatttaaaatatgaattaatagttaaaaaatattgtattatattatattatattaaaacacaaaaaatattagtatttatattttagataattaaatgtttttaattaatattattcagataccaattaataagaataaattgatagtaaaatacggataaagaatatttgaaattcttgaaaaaataaaaaactatcgtattaatattctttgtaataataatacatatttttattattgatttcaagccattagagaatttctaatgtgattaagagagttaggtattttcttcctatttttctaaatacactcaaaagatatcccaatctaatgtttttacattttcctcttaatctcataaaaaagtgtaagaaaatcgtctaaaaagtaacaataattataatttttgaaggtttttaatagtccaattgtttaatccaaattgaaagtttttagttggtacaaattatttaattcatttataattaaattagacgtgtaattttactaattatggcaaattaccatctaatagaattatcattcaatactaataaaaaaatattttatttttacacaaattaaattaatataattttttttatgaatactttctaaattttacaataaagtcaaacatattttacccatacataaattaaagtgtgtctatttcatataatactttaaaattaaattaaaaatagacatacaattagcagagttgttttttagacaaaccttgattttttgcgtgggtggtcttttcttttctgttaatcatctcacgtgcgctaccttgacttgctacatattcttcttcatagtcaaaggacaaacgttgatttagctgcctttgtcttcgtgagtttctttgaagaaacattcttcacgtaatactgtccacacacagtatttggtttgtctatgactgaaatgcgtcatttaattctaatgcattatattttttgttacattctaattattatttttaagttataaggttacattcaaatgcattaacttggaacttggaagttaatggtcaattaggaagcatatatctatatctatatctatctatctatctatatatatatatattaaaggaaaccccttaagtaagaaaagttgttaaaacaaaaaaataatgcatctataaaatataaagggaaatcaactataattatataataattatttatgaatgtcttccggttgatttagttttttttttttttttcaatggtgacactgaagttaaaacgtatttatccaaacctttcacgccgattttagtagatttatttagtttattttaatgaaagaaataattcgaatcaattaaaataaattagtttaattttataaattttctgtcaaacgcatattgtattaatccaattaatacaagttttgttgcatcgtttcaacaagtttgatttatattttgaattaaaaaaacagagataaaattcaagttaattggttcaagcaaccactttttaataagtttgttagataaataaaaaattccattaaaaaatatgttttatttttttccttttaataaaaagatgccatacgtacgttataagcaaaaatgaaatcaaatctaagtagatatttaaactgattgattcaataatcatttttttagtcaaaagtcttgttatacagatagagagatagacagatttacaacatatttgtttcttaatttatagcagatttaacgatttatttctgaataatacacaagctatcataaatatatgttacaatcacatcttaatttatagcaaatttgtttcctaatttaataatacaaaaaaatcagaaatgtacatatacataatcatattcctaattcacagcagatttccagtaaaaaaaaaatcacagctgatttattttctggtttaaccaaccacaatgaattattcaagtaacccgtcatcaaaatttaaatcacaaaatcaatatctgagtcaaagatgattaaattttattaatttaatttaattcaatttgaaccaaacatacaaaactaaattaatattttaaaaattaatttacacaaaattaatatgttcaaaattgattttttggaaatttgtagatacccaaaatgaaaattctatttagtctattaattcaatttgaactaaaacctacaaactgtcaaactaaattaatatgttcaaaatcaattaacccaaaattaatatgttcaaaattgttttcttttggaaattagttaaaatcagcagatacccaatatgaaaattctatttagtctatttaacttctcgttatagcctagcctccgttttcaaaacgtgagattttttccttttgcaaaaaccacgttatagaagtcttgacgttggtgaaatggaagttttgtttgtaaaggaattctccctagatacacaatacacatggcattctattttttttttttttcaaaatggaatcaattttataagtttaatgaagaaatgattttgactagtattattcataataatcctatgatgaccacggatgcaatttccttaaattggtttacatcaattttttaatgttaagattgcataaaaaaatcatttaagggaaaaaattaacatccagaaatacgattagattggacgcagtcatagaagttgattcgctgccatcattccttgtattaccaagaaacttcgaggaagtcgtatactcgtgcatttcctatgcattgcaactacaactaatgaatctataaattcattgagacaaggcacaaaaatgaacaaaacaagtaccattagaatatgaagttagaagcagtaggaggagggtgtaagtaccacccaaataacaagcaactaccgggtgtttgtccctcttgcttaagagacaaactattgaagctctatgacaacagcaatccaacttattctctccctcctcctcctcaaccttatgtgtctcgtggccaccgccgccatagctctctcgtaatggattctgcttcttccatggttagcttcaattatgggttggagaagagcaactcaattgcctttgcttcaagaagccaagccatagatagggaagtcaatgggagcaacaggggaagtaagaaaaggggtatttggtccaagctgctcaaattgaccaaaaagaacacccaagagaccttcatgcattccaggaccgtgagggagggaaagaattggcatttttaattagttaatttatatccagtttttcaattgatgtaactatacatgattgtgaatcaaaattgaactcacctctgaattagaggatgggtgatgggatgagcacgatcttctattgttaagatgattattggcttgttccgggaattttaatggttttctttacatttcgatgttcacaaatatttcattcttttctgcagctgtgcaatttaacaattaccatgtgatggcaacccttattcccattgctccacaagttttaaactagtcatttttaatatctactgtgatcagggtgtacatacacgagcaaaacatgagatctgtaaataatgtacaatggagaggtatgctaattgctaagcgggtagtgaaataagattatgaatcaaaacagaacaaatatctgaatgctgtataatggtgcaaatttaagtattctttctatggataatctacatttaatgtgagattgattttgtaacgagtatgagttcctgtatcaaagactatctttctatctatctttaaaatgcatttgaggtataaactaccaaaggaaacaagaaactgtacatgataatatgtttttgcatatgattaattatagaacacttgcaacttctcgcccaaattctggatatcatctagaaggaccagaaatattgccccccctaaaataatccttgtcattgtgaatattttggtccaatgcaggccgtttcagtctttgaaatatatcatcaagggactcagatgaggacacacgagacatcttagcttcctgtgtttgccgtatgggtaaaaatcctttgccccctaagttagccccgaaactccgaaaacctgttttcattgtttgccatgttgaagccaagcctgaagttccagcagcattactagaatgagtattgccgtgatcaagcaaggaaaccctagcagatgctaagtttttctcttctgccttcaatttagatgttaatccactctgctgctgatggcttccctgctcgagcaatatctccttgtctcttcaaatttttaggcagatttccatctatttctttattaactaaagaagaatttcccttcatttcaacaccattcttcacctgaaccatatcagctataaagtgagtgaactgtttgaactttgaccacaacaagaagacttacaaatgtcatatcttgcagccatcaaagtcctgataatgttgcatgaaagatgaaaatagagaaagaagattgcttctattttcttttcagtggggtgttgacataccataatattctcgccagattcaacatcaattcaattaaaattcctcactagtggaacaacttgctcgcttacattgcatccttgctcaagccaatatctttctacaaatttatatgaattgataatcagcataagtaattaacaaatcccacatttgaacaaagttcactaatttagacatcatttgtcatttaatattttgaactaaagttttgacaataacagaattcttagcttgcatacctttcggcaagataattaatcctgatggatcaaacccatccatatcttcagcttcagtttcgaaaacatataacttccagctcccaagagaatcaaataccctatcaaagaaattgcttgcaaccaaaagggagtatataaccataataagtggatagcttctgttaaacttaactccaaagaaagggacagcattatcaatgttccccattcgctgcaatcagtcatgtaaggcaccaaatcagaaaaaagaactaacagggaggaatgaaagcaaaaaatgttgattgacagctgtcaatgattcattagtttggcttatgggaaaaaagtgaacatttatgtataggtatgaaaaaacatgaaaaacatcaggcacttgaaaaataagtacatatatctggtacaataaaaaaaagaagagagcaatacattaaaacatgagaagacaagtagaaaaagaagagagcaataacataacaataacataaataaatgagcaaattttcctttcagttttgtaagttcctttcaaatatttccttgcaatgcttagtatgtaggcaagcatatgagaagacaagcatcaataaaccaattagcataatagcaaaatagcataatagcataatggtgtgtatagtaccatacccactgaggggcaaagagattaggtaaaacaccaagatctctctctccgatggaatcgcagtggcgaatggtgatgactcacttttctggtaaaatgtcgtaaacaatacgaaccgcatcattccctctgagcttcgcgccttatttttgtttgcggactagatatctatctgggcttccagggcccgcatcattcccttcctgtttgcagtaacttacatgtattttgttcttcttttaataatatttaactccaatttatcactttttctttacattattgtttttcttatttaagtaattaaaattttatgatagatttgaaatgaaaaatgatataaaagtatgcatggtaacatgatagatcgaggtcggatttgacaatccgatctcctcatcctatctccgtcaaaagtgaaaatattatagcttaaggtttataaaatagtttagttaaatgtaatttcattttcttgggttttgtaaggttatggaaaattctccaaaaactcgtttcattttttaatatttaatttacttatatatttttaaataaagacttgaatatgttttttattcctataaattctcaattttttttattttggtcctatacgttttttatttatttttaattcctatagattcatgtttttcaattttggtttttataaaaaaaaattgttcatttttaatcttgtaattttgtattgtcaattatagtccttttattttttttcatttttagtcttactgagcttccacttacaaggataactattaatgctgttcaaataaataaaaaaatctttttttttctttcttttgtacagtaccttttttttttctagaattttcaatttatcataatgtattatggagattaaatctgctctataaaataacggttatttaaccacccactccctgggacagtcatatatcattcttaacaatacgcaagacaaattggtacatctcaaaaaaatagttcttttataaaggacaaattaatcaattttagagctatcgttaaacttataagttgtcactcttagaatagatgtctttagtattcatacatttcatactcctaatcaatccttaaacctaagttctagaatgcaacagatagttcaagatgtcagatttcatcattcactttaatggagaaagcaattaatcgagagtgcaaatttattttaaatttcaataaccttcttatcatagttttatagagatagttgtgaaactttactatttatgagacgcacttacgttaaatctaattaataataaaaagatttcattacggtaaaataagtgtattgtaaagcttaactaacaactatttttttgagtttgatataccaataaacaactcaaatcactcatgatttttaaggacgtctcgattatatgttagtttacattttttttctgtcatttctgattgtatcagttctttgattattaattatcctttaaaataatttaaagttcatgctaaaaatattatattactcttttatttttatgaaactcatgaaaatatttatgatcaatcaaatcaatttaatcattttatgaaatatgattttcaaaatatatgattccaataaacaatgatactcgagcatggaaattttctccttgcaccaaacgatccctaaaggtaaactcaaaagtcactctcatttaatagctcaagtttgggcacttaacaaatgtgctattgttccattttgggcactaactatcactaataaatactttgcactacaaaggcaaacaagccatggacaattaatgttagagaggacagcagtaacacaaactgccgaattttgaagcttcccttcactctcataatcattcattaggtatgcttttgtaggcctaccttccccctcttttgattcctcaagtgaacactaagaagattctttgaaccacaatgagcatgtagaaaagttatccccacttcctttaactgccattggattctactttgtgtgcctttttctttgtgtgtgtgtgacatgacaacattgccaaagcgagcttgcggtctatttctccaaccctccaacctatgctccaattctgttttctcttttgtggatgccgtgtcactcgcgaaatttcactaacgcacttgagatttgggaacagattaactaggaacgtaagtttaaatagtgataagggataagttctgaaagaaatgtcaactttctaaattctgctttaaatcagtcatcgtaatcaattagaaagcgcaaatcatgctaagtttagagaagttgcacataaaagtgtaactcttaattaatccacttttactttttgtatagtctatagggttatctagtaaattaccaataaaaaaaactattataccagtaagcaagtaatgaataacgtgactttactattttagtatagcaagttaaaattacgcttgaagtacatataaatgataatattttcctattccaaaatatattttttttatataaatgagacttgattaactttttttatatataaatgagacttaataatcacattcagtgaagtttgaactcaaaatcttatttaaaaaaatcaagtttaattttactttgactaataatacataggtaaatttgattatctatgatacaaatttatagaatttgctagttgactttattgttgtgacatttcctaccaaatataaaacatgagttgatttattaaaacaacatttgtattagaatcattaactgaaggagtttattttagataaaagaaaatattttttttgtggtacacgttaattaaatgtaaaattttattacggtatacacacattatgataatacatactttgtttataaattgtgcatatgtcatcatcaaatgttgtaattgtatcacaaaataagtggattcagttatcttatttttttccttattaaagaataaattcatgttattcttctattgtaatacgctaaaaaaagtacctgattagctattgcaaaaaaaaataattgaaacgaggtctctttctaacaatataaagatgtcaatatttttttttatttatacacaaaagttcacattctagtcattgctaagataaacaattttaccatacataatcctttataattagttaatagtgaattttacattgttaatatattctaattaaattctttcctaaatactatttctcagtaagatgttgattatatttttttaataaaaaataagtttgttgagaagcattcatcaacactaaaaaaaagtatgtgtagaaaaatcatttgatgtatgaacagctttagacaattaagagtgatcagtcacacgatttctacaatgtagttctcctgcacatatgtccaacttcatgcgttcatgttttccttgtgctattgatctttagcaaggttgcatatctgcgaagtgccgaagactctaatgctgaagtttgagtatgacaaagtaactaacacttgtagttagattgcatttctggtttaactaaaaatcaaaaatatatttatgtcttaaaaaaataaatatataaatatatcttttgatttgttttatatttaggtttaattttatttttcgttttaaagttttccaatgtttccaataaggacattttttttatttatttaccaaatgggagcagggtagtcaataaaaaaattaccacgtggcgcgaatcttttttttttaaaaaaaaacattggtcaataaaatttaatcgatactttcggtctctattttagtcgctaatactgtttgcgacagaagttgtgatcgcaaaaggtgatagcgacggaatcagtcacgttcaggggaggcgcgactcgttgctataaatgcgtaaatatttttaaaattataataaattcgtaatttaaaaaaaaaacaattttttaatttttttccccaaaatattcatatgcttctcaactggggtttgaatgaatgaaaagtggatatatttttgaacgctggtttcggcttgtagcatgaccggacatgtcccatgaaaggaacaagatattagtgagtagggaaaggttctacctaataaagcaagagtgaatgactttttttgaaacttaaaaacccacgatggaagtgatgggccaaaattagatgactttttaagtttcatctcattcagtccaaaaaacaacagctcttctattgaaaaagaagaagaagaaagatatggtaaattataatatatgtattttatttgtattaataataaatatgataaaataatactccatgggcccagtgacccaatcaggacaataaacactcatcatgatgcaacaactccagagtttattgtaggcagcaacaactttgataattgttggatggaaattgtagctaaatatgactaccccatatataaccaataaaacaagttgtgtggacgaaagaggtttcgtttaatctatcagacaagcatcatagtaattgaatttaaccactcaatataatggcggaaagagatcaacacattttgcacattaacgatgggtagacagctgggaaaattaagaaatccaatgatcgagatggatgaatttggaaacatagaaaaaggtaaattatttggtcgggcacaatataatggccacactcttcatagatttcaggctcctcatgtgcctttttctatgaaagtcaaccaattgaaaaatgcttccattacatttacacctaagaatctaaaaagtaattaacggatcgaattgtttgaattttttttccaaattgatgatcgaactttactaatactactctactctataagctagctattgttttgtttctcttcaagtaaagcacttacttccattcccacccgttatggggaaaattgcatgttgattagcaacagttggggcaagtggagcttcattatgcatacaacacagggcagatttgttatcaatgtccgaatatgctgtatatataacttcgcaatattttcaccaaacccccttatctaccaattctgttttgttgtattgatgcggtggaatttatattttaacaattttatatatatgaaaaagaagaggaagaaaatcttacaaaaacctccttgtgatagaggatagttgactgtgacaccctatgcctttgttttagcgagttcgaaacctcttggttacctgaaaaaaatattttctattttaaaaataaaattataaaaatatcacgttattttcaccttattttttctttataaatgtacaaaaaatagaaaaataatattttcattttaataattctcattgtaatattttaaaaaataaagtaaaaaagatgatattttacaattagtagttaaaaacttgttttttttcttttcttttcaaattaaacttgcatgcccttgatttctacgaattttgtacaacgtagtaaaccatctgaattctgaacccacaacatccaacttcgggacgtgtggtggctgtcaaaggtattttagctgtttattttgatggtgctatgagatagtgaatgatgtcaaccaagtcacatgatggttgtcgagttctaaacttgtgaatcaccgagcacagtgaatcaggccgacacaaatttggcatattataaccacaattatctagatcgatttctaattaggcatttcaaagtgaggctagaaaaaaaacgagtttactaattactagtttaattagttgtatatatatatatatatatatatatatatatcatcacacatggctacaattaaacatagacctgccccatgtttttccatttctaacacgagcaaagttttctcactcaaatatatggcacattaataaattgactgctttaatttggaccgcaaatatcatgatttaccgaccatctctttatagaccagaaaagtggaaaaagagaaatcattattacctagaatcccaggtcaatgttgaagttcttcccaaattccaagctcagattttcattagtgtggcatgttctcgattattaaaagaatttccaatctgtacacgttgaactaatcaaaacaaccaaggaagactgtgaatggtgtttcctaatgcttgacatcattcagcaattgctagggtgtttccgacttcataacccaattattataactcatatgcctttgcgagcaattagagaatgattaagattattattgtataatatcattgggcatatcatgcacaaatcttcacacaccaacccaattgcggactatgagcaaattagacccaagggttaccagaaacaaaatgttacattaaaatatactacaaactttctgaatgcatgccagttaacatccttaacttttactcattatttggaatttactatggtgatatattcctcagaaacaaactttaccatatctaattctgctgaatcgttgttgtaaatgtacgtacatcacactgttttttcttttaaaaacgtacattacacttgaaaacaatagcgctatagtatatactctaatgtgaagtttctatcagttgtgtaaatacatgcgtgaaagtgacatataactaaattccaaattaatggatatcatgattaatcaattaaggtccaccacttaaaaactgcatttatggtgtaacgaatggacgatggctgaattaaatacgagccaacgcaacatgaagagatagagagagagaaggagcaagcgttcgcaattagttggacatttttcacgaaaaagaaattagttccacgtttggtgccagcagggaacttaaagaaagagtgtctctatctttggtttaccagaacagtttctttattgaaatatacctgtatttcaaagtttgactaattttgcgtataaacacggctagaaaaataataataataataatagaacctaccacatttaaaagtaatactagtattgtttaattgagataataattacgttgatctttgaaaaattctgaaaaagacttcagacaccaatgtttttctgagcatcattattcatccatttgtttaatctacatacaggtaattaattaataaactcgtgataataaaataatttctggcctattagagctgtccccaaagttggaaagagccaaacccatagcaacgtttgttttggctgacgttgttgggatttcatttgtaaggccgtagtttttttcatttctagctccttcgttttgctattgctttcatttctcacgtaacctaaaaagaaaaatgaaaattaattgctgcctctctagtacaaaagccaaaataaattggctagaaagaaagtcccttcatcaaataatccaaaatcttaacaccatcattcgcttctatctcaaacagccaaaaagaaaaccaaacaaagcaaaagcgaaagaaaccgcaatttcaattttctttttttcccctaaagaaacatctcaacaccagtcacacctccgttaaaaaacaacaacaactgcatagtgcgtactctatagcctaataatgagacatgtaccagtcttttttttagttcaatggatacgactatgaggatgaatatggaataattgttaaaattaaataattttaatcattcattacatgagtttttatttggataaatttgctgaactcaaacttaatatgattatcatttatgaaatgattatcactcagttcttatttaaaaagttctccttattcaatatttaatatggtattagaattcaaatttaaaatcacttgttaaattacaaaaattttataccaattgatttgtatacttggtagtaaatataaattatgatcattttataaaagtctaatggtgatacattaattaattaatggtgtaaaataattttatattatcatcttaattataaattattattgatatgattttaagataattttgtaaaagttaataaatttattatatatgacatttgtaattagataattttatactgtactaataatgacattttttctccttttataatatcaattaattaaaaatcattttaatatgatttttaatataacgaattatggaagtcgagaaatttatgatagtttaactctaaaaaaggtcatagaatatgcacatattatttatttctactatatatttaatataattatgatacagtaaaagaaaattttaatataattatattatatacttttcttacacactgtttgacaaacaaaaagtgtaaccgccctctccagtcttcaccgttcctctctttctccgacgcgcacacacaaatttcgtttctattttctgattaccactctctttctcgaattctccaatgaccggcggcgacgagcgtcacgggacagagacctaaaaacatctccctctctctcacaaacactcattctccggcaggcatgtccgaggacgcgaacctggctctgcagacgttccgcgcgctggtggagagcgcggaccggaagttcggccgggtgcgcgacgtgacggcgtacggcggcggtgcgagccagcagcaccacgcgttccagaaggtgttcaaggcgtacacgcggctgtggaagtaccagcaggagaaccgcgcgaagctggtggagtgcggcatgaagcggtgggaaatcggcgagatcgcgagccgaatcggacagctgtacttcgggcagtacatgaggagcagcgagtgcaggttcctcgtcgaggcctacgtcttctacgaggccatactcagcagaaggtacttccagggatccgaacccaacgccaaagatctcggagttcgctccaaggagctgaggttctacgcgcgctttttgctcgtttcagttattctcaaccgcaccgagatggttaagcacctcgtcgaacgctttggggctttggttgaggattgcaggactacctttcgggtaatgcattgtttctctgctcaatttgacttaatttttgtttcagctttccgaaagcaaactgaactaactaatcttcatcttcatcttcatctttgtatttgtgtgttatgtgtgtagttattttattttcttgtttttgtcaatgaagttgttaggagtgaaaagatgtgtgatgtgcttggtgtttcctttcttgtgttcgacgctgaaaagtgataatacttttaacttagagattaagtaagaagttgctctgaatcaactggttcttggtcattgtatgatacttggtttagggtccataggtttcgtctgaggatgattcgaatagcttctcttgttttggctgggctatatgatagaacagaaccgcgaggacttgaggacttgatctgtgtaatgaccccacctagcctcggttgttcttccatgtgatatggttggtagagttcgcggttgttttttttttggatagaatccatgtcactaaattatgttagtttcatcgtttgatggcaatcccactgtagcagatttctgtaattagtaatttaatctttgtttcattgacatctgatttcacgggataaaattgatgggtatctaatggatatttgtttaagcaaactctccgttccttttgttttagaataggttattttcatagccttagcagcaacattctcttttggttacttctgactattgtatgaactatgaactatgaaagtgatcaggagagctcttgaaaaggatatatcaaggttatttgaagttactcagttttaaagtaataaagaaaagcaagtgatgattctttttaaaagaaatagcctcccattttagaaccatattaatgctggatcaactgaatttcaaactgtacgctactatgctatattgactgcaggggccagttttctagaataaattgttggtgtggtgataattttcttttcaaatcttacatgaagttcttttcagcaagtatataataataaagaaataaattcctgttagtgggctaaacaaaacaaatgattcggaagttcctaagttatactgcctatggagagcagttttctagaataacattgttggtgcaaatatgattttctttccaaaccctatctatatatagggtgtgtaactaatgagagcatgagatgtaggcagaatcaatcttgaccatactactaaacattgatagtcaagattgttttacttagatctaatattggtcatctatttatgattttatggtcaaaatcagttctctcataagggcatgctcacacctgatatgctcctacagtcctatgcacacatagttcaatgatcgatttgttgaaagtatgatatgaaattcttgtcagtaagtacatgataataaaaacaaattgcagctagttgacaagacaaaaggttctgaagttcctaaatgtattacacatgttgatttgataagtagatcacagaccaagagaataaaagtgttatgcttgaaataatgttacttaactagttgcatgatgacaacagtcctattgactatatttggtaatttttgtaaaattacttgaactttttgtctctcgcctgagaccttggtcatcttcatctctgcataagactgcattgtttggcttcaggtgttcatcacttataaatttacttcattagattattttgcacgtttgattatctgaagtcaagcttccacttctcaatctgattgttttatataatttcacttttaaactcatactgttcattattaacattgaattttgtgtttttctttaagataaaaaaaaatctcatgaaactttgctataatatactttgttgatgctttgtattccactttcatctggagaaaacattatatctatataacctggttaatttataaatgtgaatcatttcatttcatttcaggaaactaactttaaggaatggaggcaagtggtgacagaaattaaccgtttcacgaaagttgacaagggctttagtttcaggcccatgcgttattgtgccacatttgatactcatcgagcttctcttccttatgtggctcgttttcatgcaaagagggttttgaaatttcaagatgcactgttgacaagctatcatcgaaatgaggttaatactgattcatgttgccaaggttgtttttagatttggattaataaattactttagtacctgaaaggactgaagcttttgaatctttatatattctctcacctacaggtcaagtttgctgagcttacattggacatctatagaatgatacaatgtttagaatgggagcctagtggagtattctaccaaaaacatacagttaaacctaaggagaatggtgacataattgatcattcaggagcttccgggataatagacatgaatcttactgcagatatgtctgatccaactatacctcctaatcctagaaaggctaccctgtaccgtccatctgtgacacatgtgatagcagtgagttttcaaagcctattggaaagtttgcgttacatacttgcttgtctatttactaaaatctataggcagttctgagaactaggcttcttcaatatcaaatagtatttcatggctattttatggcttctcctatcaggactgggatattcttgggtacctttggtgtgcttcattggttcttatgtatactataatatgctttcttgtctgttcgtgcacacatacctgtttttgggtttgttttttccttagtgctgtgtgatctgattcatgaattgatatccaaaatattcacttgtcaaaagtggctgtttacatcctattgatatgcaatctttctcaggctgtttaacacacaatttgttatttcttgtataaacttcatgatgttatgcaggttttggctacaatttgtgaggagcttccaccagactgtgttgtgctagtatatctttcagcctcaggtttacatttgccctgtcttttcaagtatagtctctctctcatgtcctgttatactaggttagttaccttaatgatcactcatgcagggaagggtggtcttaataatgtctctcaagtggagaattttagcagttcatccaaatattcaagacgcaaattcctttcccagacttcccagggacagaattctggaccttccgaaactcaaaataatggcaagagagaactgagctattatgacaattatctgtggtttggtcccaagggaaatagtggttagtctattctctgtcaaatttctgttcagattgttctaggaaatgttacatgcatgttatattttctcttcattttatgggttagttttaattagatgttatataaaaaacaatcatctatgttgtagctgcacttacatgtgctttatttgaatcaccaggttcaaataatctctaccctggcgatcttatccccttcactaggaaacctcttttcctgattattgacagtgataacagccatgcattcaaggcaggtttgtcaaaactcagaacttgtgtataagttgcctgtgaactttgttaggcggagctgttcaggatattccttgaatctaattttactttttaatggcttggtgacatttgcaattagtttattactttgtagtctgagggtttgttataacaatttaaattgaattttaactcactaacctcagaaaaccttgccttgtcgaatttcttccaaaaatttgaatatgaatgtagaactttctcagaggacaaagttgaatgggtggaaagaaagaaccgttgtcaacaattcatgtttacttacaaaaagaatggcaaatacagcatttttctgggttataatgattttgtggttagttttttttaggtgtggggggttaatattgcttgttggcttgttccatgttaaacttatattggaattgataggaattagaaaatgctgtcttttttaggcttgagaattgattgacccattttatttactttgacaggccttgattgattgtgtacgtcataaattattgcaggttttacatggggctgaaaggggtgaagcggctgctctatttctttcacctttaagaccgattttcaagaatccatctgatgtaaattcaaataatggaagccaatttaccttttttttgactgctcctttgtcagcattttgccaaatgattggtctctcccccaacgagtctgatacagtaagcaatgcacgaataatctttaacatttctcagattaacttttaattcttgttggtctaattttgtgttaacctgtaggatgtctacaatgaagcagagaacataatcgctaatgctttcactgagtgggaaataattctttgctcatcaactaccatggatttagtatgggcgcaggttataagtgatccatttctaaggcggcttattctaaggtatttactctctagtttttagccaatgtagtctttttcttatttattttaattggtgattgttttggaaaatcacaaaatagctgtttactgctatttggagttcaagcgctattaaatttaagttattgaatgggcttgctgtatgacatgttggcatcattttatgtacagattcatattctgccgatccgtgatatcttttttctgcccacctgaggaaagtgaacagtacctgccactttgtttaccccatctaccgtcttctgttgcaccaacgtctgaagccgtgcgttctgctgttttgcaacttgccatgcactttgacgttgctgactactttcactttactgaaacgtaagattttgggactttaaaaagtaacgagtaaaatgttaggcttacatgcaggctttggaagctaaggattctcagatcaaaggaatacaacacattatatgagttgacctttcgggcgacaggacaagagtatttattgtgcggcatgggctgtctgatggaaaaagagattgttgcctctgcctgttgtgttgcttaatttgaccccacctgcttcattgatctatatgctgtatttggtggtttgctctgtaatgttaaggttaggtcatgatgggtgcatggtgacttttcatgtgtttggtcgtggcaagataattttgttttggtaacgtggcaagatagttgttagtttaaatatttgttcatacttcatagctttgaaaactgaaaaaaaagaaagtcattgttaattttacctttttggagcagaattggacggtattgaataacattgattgaggaggatgtattctgggaagaactaattccgtcaaaacccaaaagtaaattacttaccctgtatattcaattttagagttttatcatatttatttatagaaacattgcacaacatatcatgcggtaattatgataatacaatctgatagacaacaaatagctaactactgtgaatactatattcttaaaatttcacgtccgataggagtcaatcttgtttaagggaagaatatgcaaaacaaaggaaaaacactttgaaattcaagcaagtacattaattataagagaataattgagtgtaatattagagggatatgagtattagagtatgtattcaaatctgaataatgagtattaaatgagctccttaataacatagttatctaattcaaaatataagataagatgtatctatatactgttatttatagataaataacatataacttgtagagatattaggtgataaagtgattacacttatttgaaatgactcatatagttgatatgttgttaatataaaaatatgaatggtaggcatccgtcttcctatggaaagttgactttcatccttttataacaacactattaatgtagtattgttaacatggaaggtgtccacgtatatatgtatatagtgacattgcaatgatggtcacatgtaactttatcatttttggattatacataactactacaaagactatgttaaaagctaaagaaaaaaaagctaaagaaaagataaagctaaaattgatatttcaaaatacaaaatgtttatttttataattactgtaagattatcacaaaagtcaaatggggttacaagaaactcttcttactatgctgactatagcgaactctaaataatacacacaatgcagctaatagtttcaattttgaataacttaaattattttgtaataatgtttatctttagagtacattaataaatcacattatttttttaatcatatttttcatttttggactgagtaaaatcattataagtagtaaaaaattctttaaatatttaatacaattacatattaactaattaagctggaacgatttgcatttgcattatttattaattcttaatttacatttacattaatattatattcttgaaataataatagttgggatcacgttcattactgtccagtgttgcatgtcaccttcttttatttttttttttttaaaaaaaactgtccaatttaatgtttattggcaaattttaatattatattatgtcaaactatttatatccatcttcaatttataaacgtgggttaaatattattctctaaatactaatataaattagaaaaaagtgcagttatatgtgtaaatttttcttaaaatataaaagtaaaatttacaaaaccacacttaatgattcttaggacttgcaaagatattcttaggacttcatgcaataactaaaaatagactctatcagtattacctgatgcgagtgatgacacatacttttcgacatatcattgatcaggtcaaaggaggcattgaaactagctattctaaacttgcactgaaaaacttatatcaaggttggtttgcaagcacacgaacacatgggtgcataaaccattgatcactcggcctcggaagctatctaatagtaccttacctccgttccttattataaaagacaagttaaatatattttatacatcataatttatttcttataaaaagaacataaataatatacaagaggaattttatttatacaataaaattttattataaagtttataagagaaagagaaatgagaaaaaaaaattgagataaaaatgatgtgaaagaaagggataaaaaataccatgtgtgtaaaaaaatttatacaaaaggaccttctaagaaaaacttataacattagtcattgtattcagacactttaatcatacaaaaggaccttctaataatttgcttaagcaatggaagcaaacaagaactaagacacttcactacatcaggcaatgaatgtgctctactgcctcttcagcagtggcggatctatatagtaaccagggtgggtaggtgcatccctcgtttcaataaactagtatttgtcttaaaatattatactttgcattctataattttatattttgtaccctataattttatatatttgaattttcttatcaattcacatgtaagagtaagtaaatatatcatcttattttaataaaatgtaaaaaatattatattttacaccccataattttatattttaaaccttctaattttatgtatttgaatctccttaccagttcacatgtaagactaagtaaatgcactcttttattttaataaaatacaaatatttatcttaaaactttaaattttgtacctgttatcttcgtgtttgaatcaaattattccatatgataatgataattatcaatttttattttttaaataaattacccccactgatccagggtcctagatccgcctctgctcttcagtatacatttgcatttcctgatacgagttttgggttttgctgttactcccagaataaagaatttgtaagttctgccagaaacaataatagctagcacttaccaaaacaccattactctttctttattcgttccattttttgtcagccaagacacataatacaagtattaacccatacacaagaaacagaattccaacgaaactttcatacaaagaaaaacatccttagaccattaaaaaagagagaaagaaaaaccctttaattacttgacacttaaccatgactaggatctaaatttaattaaatccatcgcatactattctctttcaatgcgacgtccagcgtgtgctcactcatatttgcaaagcacaccctgaaccaccctgttcacaacaatggcgagagagatattaagtaattcacttaatgcaaaatggcattccaaagctccaattctccttcccctagatggcttccaacagtggactcagattcattcagcaaacaatcctacattcactttcaagcactctatcccaacacttgttaacccttcaatgatcatttgacacctcttcctcagcctctctgtgttgttctaaacgtagttctccgtgaacttgttatcagacaatatagaagccaaaaagtgctgtgtgtgaaacttggcatccttctccatcgttgtggtcttattggatcacacagtcacagacgaacgggccccacacactcccacaacacaatgctttattaagttcgagaaaaccatttgcggatgtgtggcatatgttggtatgaaatattatatttgaagggaaaagagataatttcgtccattcactccaatatttgtattagtgaagtgtgaaatgaatagtgtttttcttatattttattacttaaaatattatataatactattacttaggaatgtggcaatttcactcatagacccaaccttttggcgccaacgccactcctttctcctccaatcgcgatgtgtaccacgcgaacctcaacatcgctgccctctcactcgccggaaagtcgacgcctcgcgcaaactgttcgacgaaatgcccataaaacggccttctccaacactccaaagcactcttccactccatgccgctccgcaacgtcgtttcctggaactccatcatcgccgcctgcgtccaatacgacgacctccacgacgcgttccgctacttcgccgccgcgccggagaagaacgccgcgtcgtacaccgccgtgatctcggggctcgcgaggtgcgggcgcatggaggacgcgcagaggctcttcgaagcgatgtcgtgaccgaacgtcgtgtcatacaccgcgatggtggatgggtacgcgagggtggagggagggattgggctcgcaagggcgctgttcgaagcgatgcctcgaaggaacgcggtgtcgtgggttgtgatgatcaatggtttggtggagaatgggttgtgcgaggaagcgtgggaagtgtttgtgagaatgccgcagaagaatgactttgcgaggaccgctatgattactgggttttgtaaagaagggaagatggaagacgcgaagactttgtttcaagagattcgatgcagagatagcttttcttggaatataatcataacgagtacgccgagctttaagatttcaagctttcaacctccacgccaatatgtgttagttagcttataactgaaaagtgtttgtgatttatttttatttttgttgagagaagtgttttttgtttttcaattagatgtgtttttaaaaaaatgttatagaactagagactctatagaaataagcttggtagttaggcttctagttattgtctttggtgtttggttccttgtatatgattctccaaagtctgaattgaaattgaatggcattttttagtttgtgggtatccttacatatgatctagaccttcgggatgacaatgaagattgtgatttatcaaatgggcatttttgaagatcctttgggccatttcccacctatcaaagtcccagccttcattgtttcattcacaggaaaccagtggttttaactcattaaaggtccggagaatagtaaccatcagcatgctgccatgattgagcagattaaatcttggttagctaaagattggcaagttaatctttcccatgtttggcgtgaatgtaatcatgttgctgatagattagcagctaagggtcatgagcttctcttgggtcttcatatttttaactctcctcctccggactttcataatgtttggtggattgattttgtagggattcatttcccacgttttattctctcttagattaggggcttctgcccccccccccctccgtatcaaaaaaaaaaaaaagagagattttcttcagaataacccttttatagagcaaaagtccagcttggtcaaagacatcctaagacttctcactgctgttcttgacaatgatgatgtagctaggtctgctcatttcatgctgctgcatcttccattcaaagtgcatgctagagtagatgctcttgcttttttttatcagccagtagatgctcttgctatgggaaagctttcattatatcttattttaaaaaaggaacgaataacaactagaactagaagcctaactgtctgtgacttattccattggagtttctagttctattaaagtgtataataatcatgtaaatatatgtaagtcttttgaaaaaataaatcggatcctctctgcctgttatgtaatataagtaatattaatatagtaatattcaatagagatactctctttttttatcaattaaggacttgttataattaacttttaagacagattattatttatatccaataagaatttttttttaactctaatataattttattatcttttttttttaagaaaaacgaatggcgaatattccttgcttgctctaaaatttagcttaatttagaaaagttttatccgtttatagcatattttgattaaattgttgagcaaaaaacaatgacttgtggtcctaggaggaggaggttgtttgcttctgctctggtcattacatttttatttatttattattccatcttttcacaattgattcaccgtttgtaggttatgcccaaaatgggagaggggaagaggcactgaatttgtttcacaaatgatcaggaccggtatgcaaccagatgatttgacttttgtttcagttttcattgcctgtgcaagtcttgcatcactggaagaaggaagcaaggcacatgctcttgtaattaaccatggctttgattcagatttgtcaatgtgtaatgccctgattactatgcacagcaaatgtggtggaattgttgattctgagttagtttttggacaaatttcccatcgggaccttttttcatggaacagtcattgctgcatatgcaccgcatggtctctaatgacaaagcacgatctttgaccagatggtgacagtcagtgttcaacctgatggcataacttatctgagtttactatctgtgtgttgtcatgctgggaaggttgatgaaagcatgaatctattcagtttgatggttcataattatggtattccaccaaggtctgaacactatgcttgcttagtggacctgatgagtagagcaggtcagttgcagagagcttgcaaaataatcaatgacatgccattcaaggcatgagaatgttgtttccagtgtttagctctgagaattaatgttggatttggaatatgcaatgtggaataattaagtacacactttgatgaccgatgcttagaaagtattcttgtttgcctgaatcctagtattgctttaagtgatttatttttgtattttgaatatgggttagatttttttaaaaaatgattacctgtctcctatctgttgaagtacctcaacttaatttgaaaacttgaaaacgctaataacaatttttttaaagacattctttattttaaagaataaatataaatcaattcattaataaaaatcaatagttaaaattatgataaaatacttatataaaataaattctcaaatgtcaacagttaatttatttaataactgttataattttaaattaattttatcccctaaacaactaaacataacatgtcattcattataaaaaaaataaaaaataaaaaagttcaatccaattaatactacccattctcacttggcttacagagattaacattaaaaattagttactagtcgttatgacaaatttcattttttccggtaattaggttaggttggactatcttattaagctttcctacagggtatgctaaaatttcaaaattatgtcatcactattcaagtgtgttaactttcaaaaaaaaaaaattggctatcaatcattcactacacactcgacaaattgaggtttctcagataatacatggtatatgatcattacatacaataataaaataaagaattgggagatgatttcgtaattaactcaaaattattggtaaggatgtaatatcaaattatcacgtacactacaccatgtttctttgaatagacttataaatagatgaaaatagaaagggaagagtgaaagacatgggataaaaatatctaatttttaccatttgtttaataaaaaaaataggaagaaggaattttttttctgatacgcaaaatgacattagcatattcttcagtttaattgtagataaatagttatttattttttaaaaatcctaagaatctaaaaataaattgaattaaagttgtatttaattaatcggtatttgataaaactagttaaaatattaactgaaaactagcaaattaactaataattgaaaattgaaagttataaatgtaacatctcgtatgcatccggtgtattaacattattattatatcataatagcgcagcaatatcataaaagaacaagaagcttcaaacaagatgacgtcatcaagcgtgattaataaagtcaactatacattatatacatatgtgggaaattcttacaatatacaaggtataatagtctcaaaactgtacaaatatcccctcagggtattaaatacaggcataatcaaaatttgagccaacatgctcatcactctatgtctaaggttatcaaagaactattcctactcaagcctcttgccttgagatttatcaactactcctggatcatcacatgcaaacatgagctccaacaggggtatgataataatctcagtaaactcagggtccttggaggtctttcctccccttggttcacttccataaatatgacacgattattacatcaaaataacaatatatatatatatatatacacatatacatttctctatgcacatatcacatggtcggagatatcatctatccaaaagatacattctctccagactccattcacacacacacacactacctgaggaagatcttccagtgaagggctctccattcactcaggacttttatccactgcctgaggaagatcatccagtgaaggactctccattcgctcaggtcttagatggatatctatggtacatcctagggaagatcatcctccaagggcactcattccaagggaatccatagaaacttattctactggccagagaatctcacaatcacataacacaatactatcataacatttatcttattatcaatatagaacataacattatcacagtgtttagtttatcatcaaccatagaacactatcatagtgttcatctcatcataatgtacatgctttcaataaaacagtgacacacaagcaaaggaaatcattccaaggaacaatgagcttacctgctctcagctcaatactggctctcccactttcgtggtcaccaccacccacaatgtaaatctcacgtcctacatcaggcatgtaacaaacaatcaatacggtcctcaaccgttagaatgaaaggaaaacaccattcatttccataaaatcccctctgtcctctatcttagggttacaagggtaaaccaccttataagtgatctatagaccctcacctagatccatttggatccaaccaagatcatagagtccctcttagactctgcataggttcaattaatgatctactagttcataaatcaacaattgtccaacatagccaaaacagatataccaacacgttttcatcgtttatttggctttatgaacaacttttgtaaagacacttagattcatatatatcataataccttccattcactcaatcttcttcctacccataccaaactcaaggtcagaaccaaatttcatcataaatcaagtttcaaagttccatatttctcagaacaacctcctaactatacatttctaaagaacctaagtctaattccagccctaacacaaaagggttactattcatcctattacaaatttcacaaattaaacggtgaaacttaagtttcttaccttaacacagtcgaggttctctcagctctggcgcccttgaatcgccctcttttcctcccaaaactcagtttcccacagttccttagagaatggaggttcttggttttctttaagaatctaggttggaatctagctcataagtggttctaatcatgtttcttggtagttaggaggtgtttagatgaagtatggaggagttatgaagctcctatggtcatcaatggccgtttgggttagaggaagaagaagaagaagggttttggccttcaaaatgcgtgaaatggccttttatactggctcagatgtgttctggtgctaaccgcgccaattttggcgctgatcgcgttagatttcagagaaaatacactttctggaacacttctggcgctaatcgctccagttcaagcgttatccgcgccaaaatccagagaaaatgtgttttccagggcactactggcactatcggcgccatatctagcgctaatcgcgccaaaaaccatgaaaaatagccttatactacaatgtcacgctatcagtcccagctacagtgaaaatatttttttttttttacaaactcgagttattataataaaattatctgttaagataactaaacaatataaaagaacataattaaaaagttataaacttttaagtaacaacttataacatttaactaacttataaacttaaaccagcatgtacataaagctagcataaacattctaagagtatgcttggatttttggtagaatattttaaaatatatttgaaaataaaatcagaattatttaaattatctcaaaaattgtttgaaatttttttttctatttactgtttttattttttacagaaatctataaattcaattttttaaaaaaattaacgtacttttataaactaaagtctaattcaaatttaagtttgcaaaaattaaatataattcgagcatgactaaattgaagacggagccgatagaatggcatgtgttattaactgaaatccgggtaaggtcacagaaatccatgaaaaggaaaggtgcagtgtgcagtgtttctctcagaaaccgaagttcaagaaaagtacccacttaacatttccttcttctcatatgctcatcacaaccgttgatgcttgcttttggacgcaccactttttcttggctttcttccatcagtccccaaacaaagaaaaaagcgggccccaccaccttccctctaacaaggacagtgctggtcccaccacacccaccacccgcttcccaaaaatattgcttttgctacactccaccaactcttccttcatttttttaatccgacacttcgttagtttttattaattgaagatgtttttttttttaatcatccaacgaattttttgtgagaaaaaggtaatctaagtcccaaataagaaactcattaaaattcaccaggattagaagtcgaaactgcatcattcatacctttaaagaaataaaggatgacatcatcttcaccatccaacaaattttatattttcattccaactcttcatccaagatttattcaatccacacaaataaacattcaatcaaaatttcatgttataacttacaacttccaatttagtacacatactaaattatatttggacataaaaaatttcaaacattcaattaataacttttttgtccttttttttgtattatactatattatcaatcaaaacaattatttatctttttttcttatttctctcaatttataaataattcaaagttgttcagaaaatacttttatttataaaagagtttggagttatttaatataaattttaaaaagaccatgcatttaatattttatggattcataaacacattgtttgatgaactcaaatatatataaataatgaaacacgtagtttatgttgcacaaaatttaagtctagtattatatgtgatttttaagaattattcgccaattaaagcagtagttttattttacataataagaattaatattaaaacttttcgttcgtacattttttgggggggaacttttataatacaacctgtttgtccagcgatacatatgtatgaacattatcccctgtttgtccagtgatactccaataaagagagaggaaaagggcatagagtggtccggagatgggtggaagaggttgtctaagtatgaactttggctcataattgatgtggcagctcttcactttaaaaatataaatatgttatttaatattataatccttttgctttctctatttctataatttgaacacattatcggtctctaatttttcagccgttatcaaaatttgctttttgtttggtagttttttcttcttcttagttttgttctcttttatgttcacgggatactttcatactttattcaacttgataatttatttcatctcatattttgtttttcatatgtattgcgataattgttattattgttgtttttaagataagtacattgttaaaaaaaaatccatctttctttctccctaagatcttaaaatgagatctatcattaaaaaacaaaatggaagggattttgagagattttcaatcctacgtgttattatgagtattttaaaaagtgatctaagatcccaatttggaatctatcactaaaaatgctctaaatgagatattgataatggttgattttaataatcaagactctatttggttataagaagataaatataatagatggaaataaaagagagacaactagaggaaagagaaatatactaatatagtaaaaataaagtgaaatgtttaattgtttaggttaagtaaaaataaagtaaaaataaaataataaatttgtaaaaatactattgtaccattaaaatttgattattttgtgtgatatctaaaaaatgaaaattatctcaatatataatatgaatgtgttcaaaagagtaattaacatttatctatgtatctattataccattacattggtaataaaacaacatcattttgtattttctttgaaatttttttaaacatgtcaacaattgtaaaatgtgcacaaattcaatagttagatagtaaatttcgcaaaaagaaaatttaggtagtaaaacttgtgaaatcatgaaagttggatgataaaatttagaattgagccatatatacatatattaatcattggatttttttaatttaacttgaaaaaaaaaacactataagtacatatgatcatgtgaaaaatccaaagatctatctattatttttgttttttatcattaaattgacaaactatcaatattttttttatcaaatctacaacttttgtctttcttttttctccttttactatcaaaccaacatgataactccaattatcaatcatttatttgtcaataatattcacaacaattgttcaacaactaattaaaaaacaataaataaatatcaataatctcctcacaaatattaatgttttgaaatttagataaaagttataacatgaatatgaagaaaaacatacaaaataaaagtataccaatattgttaaataatatgataaagttacatttcttagtaatgagaggtattagaagaaaggcctccatgccaataggtacaaagttgaaatattctattttattttataaaaataaaataaagagtaatcatttaatagaaaaataaaaacattttaagatctcaaaatactgtgctttgttcctgaataatcaaaagagcattcgttttaatttgtaaagcatcaaattattcgagaaaaattacttactccaatttaaattatcactcgttttagaaaatagtttttatttctttatttcatatgttatctataaaattaaaaatatcattttaatttttatcatcatcttttaatattactattagaaggaataaaaaaactaattacacggtaatattttaaatatttcaatataaaataaatacattacaatttttttaaaatcatatatgtaaacaaaatttactttgtaaacttttgaatagtgcatatctttaaatggagataggtgacattgtttaaacttattttttaaaacaataattttcttaataaaataagtaattttattttttctgatttgttaatttaaatagtttttatttaaaataaatagtttattttaaaaaaaagtaaatcttatacgtttctttaaataacatttatgttaaattgattttttatgtttaaacaaaatcatccataatgttcactaaaaaaaaaaagtgaacataatgttgtgactcacgaaacaagttaatttagctaggatttgtattttgtttttattttttaataacacatatattttgtaaacaattttatttcagtcaataacattataaatgataatttttttcaaatatttaatataatcacaaactaataatttaaactaaaaattattagttaaattgagaaaaaccccacaccaatctacatactcagatgtgagcttggattttcatgtaagcatttgtttgattaagctgtgttcatttatttatagaaaaggagcctatacgatttttaagacaaaaacccattgtgaaagctattcatttcaagaaaagaaaaagaaatcagttctaactgctaactgctaacttctaacttctaacttcaaagataatcccttttatacaatcaggcactgagagaggatgtttgaaactatatcctccaaaggtaaggtaattaattagacaaatcattaaaactgggcaaggcatggattctgcaggatgtgaatgtgatagactccaaagttggaaacatctgtctcaacaaaaatgaagcctagaccagatacaataaattccagattcatcgaatatacaataaatacgccctccattaagacattaatgtcttgttttaaatatatcgtgcatcacgtgaatatattttttgggacatctatcatatgattatttttaaatataaataaaatataaaactataaattaaagcatttcaaatttttacttggttaatgaaatattaattataaataataaaaataaaatcgtgtttaaattttaaaaacgaggtagttttggataaaggaaatttcatttttaagcaatttaaaatacatgaaagtttaactattacaatgaaaaccctttcatttttaaagcattttatttgaataaaatagtgattcaaatctcttatgtttcgaattctatgtttagataagttaattttaaaatcatttcatttcttatttcaaatcttaagattaaagaacagttaaggggattttattgatctatgcatacaacttaaaagtgatttttaaattacaaatataaaattatcaagtactttatttttttactctttctaacaaagggaaaaaaaattgttaacaaaactctgtcctacgttcttttgaatatactttttttatttgctaaatttagctataaaataaaataaatgcttgctgttttcttaccaaataaaagtaatacacgaggcattttaattaaatttgtaatgaggtgtcagataaggtcttctccaaatttgtctatgcatggctgtgatctgacctgtctctgctcctccacctcgtaagtcgtaacaagtaccctcattcattcgcatattacttctctgtagtgcgcacccacacccactcgccgagagtagcaaactcctatactcgcgcttctgacgcgaaaaatggtcaacaccagttgacctgtgttctcttcatgttcgtggaagggcgagtacgcgtcgctgtccttacccgacgtttggtcctggaaacaatcgactgcatcgtcggatcaaaatctttgtttgtctgctactactttcagccaatgaattcacgccatgtgtcactttttttttttttatcttctgatattttattttgtttactttccccatcttaaaatatgttattttacgcactttagaaaagctaataaatactatcatatatcatagaataataattttataaaactaatcttatcaaataaataaataaataaaataatattaatattgattaaaaataaaataaatataaataacattaaaaatcaaatacaatatttattataaatgtaactagtattttttaatccatttttaaaaagtaattatattaaaaacttggtaaaagagtcttacccttcatgctcggattagtgagatgctttatgtgagggttgttatctgatataaacaaaattgcaggccataatatgcgtaaaattttcacttataatacaaatatggtatttatacatatcaattaataattcaaatacttaaaagatgtaataataataataataataataataataataataataatagtaataataatatagtaaatactaatagtttttattcttttacaatattctctaaccattaaacaaagtaaatttcgaagatttttatgttttcaaaatattaaatatgttggttaattttctataagatattaagatgattatcaagaaaaaatagtgaaaaaggatatgtcatctctcataaattatacctacctaaactaaatacttgtatatatttctgacatacaaagtcctgtgtctgaaggcatagtgacagtccaattgtaatttgcaataagggcatccaaacccagaacctaatcatcttctatttgcaaacttttgcgcattggaatttggaggccataaaaaagatgcgatgctacacgcaaacaagtagttaaagtccaataagaaaagcaagatagaaagattgtctagatcacacacctcaattaatacaacaccctgttgctgatagttattacatagagttcaattcaagcttgcaagcttaaccatggaacggtatgagataattaaagatattgggtcagggaactttggtgtggcaaagctggtcaaggaaaaatggagtggtgaattgtatgctatcaagttcattgagcgaggcttcaaggttccattttcaaactccatgtatcttttgtgttgtcatatctcaatcttgtacatatgtactttggattgtcctttgttaatggggttctattgggttttgcagattgatgaacacgtgcaaagagagattataaatcataggtccttgaagcatcccaatatcattagatttaaagaggtaaggaattggaacatttttggtttcaatgagtatagtctcaaagtgtaattgtttaccttctctgaagaaaatcattcccttcctttagctacttcttaccaactttgtgaaaatatatatgcatccagggacatatacacctaaactctgtcctaaattcaattttgtcccggaatggaataaatattcgagacgggttatgaaagcatggtttctttctatcttcctcataattcagttttattctctacaatatacagttccctgaaggatctcaatattcagggtcatttttttggttttccttaaaaggaatttccagaatcttgtaaagaactgaacaagaaatcttttcaatttgatttcttaaattctttctcttatattttatcgagctcccatgtcaactagtaatatgaccaaaacagtgcatacaggcaacaaaagataggtgctttgaaagaagaagatatacattactcttgtaataggagatgtaatgtttcttcttcgttcaaagctctcttcatgttttatcgtccctcatttatatatattattgtaactatatgactagtccaggtgggatttatagcatgttagctaacagcatcttgacttttatgccgatttgtgacatataattcatcgcaggtgttactcactccaactcatcttgcaatagtcatggaatatgctgccgggggagaactgtttgaaagaatatgcagtgctgggagattcagtgaggacgaggtagattagattagatataaatcatttctaataattgataacgaaaagcttcagtggctttatgatagtgcttttgttcaagatggccattgtattacttaactttttagattccaaaacagtaaaattaagattgcatcaactgtacattatgcatgaaacatattagtgtgtgaaatttcgaatggcaagttgatggcctgttggctgctttctaataatttggacatcgtatctagactctcttttttttttttttttttttagttttattttatatatagtatttctatatttcacattctagatacttgtaacagaaaatttcacactaatttctccttttccatgcataggcgagatatttctttcagcaactgatttctggagtcagctattgccattcaatggtaccatattcttgtccaatctgaatccaaatggtttatttttcaatgaatgatttaaattaagtcctactactttaaatagctgaattgaaggtgtaattttgctgcaggaaatttgccatagagatcttaagctggagaacacacttctagatggaagctcagcaccacgacttaaaatctgtgacttcggttactcaaaggcaagtacttattgctacttcttaatttcatttaacataatgtttcttaattactcaacggtgttcctatctttcttcagtcatctgttttgcactcccagccaaaatctactgtaggaacccctgcctatattgcaccagaggttttgtcaagaagagaatatgatggcaaggtaactttatatctaaattttccctttccaatcatgtagccgtggcttcactcatttggagctaatgtttggccactgataagttcttatccttgagaatgattaggtcgcggatgtttggtcttgtggggtgaccctatatgtgatgttggttggagcatatccttttgaagacccagaagacccaagaaacttcagaaaaacacttcaggttagttggaccaataataatacgagttcccttttagttttccaagagtaatatgactaattaattattaattagtttatttttggataattttggcagcgaattcttagtgtccactattctattccagactatgtacgtatcagtaaagagtgtaggtaccttttgtctcgaatatttgtggccaacccggaaaaggtacaaattatttatgtttgttgcagaacataataacatttttttatttattatatgatgttaactttgtgttacattatttgaagcagagaattaccataccggagattaaaatgcacccttggttcctaaagaatttgccactagaatttacggaagagggtgaaggggtgttgcaaaatgatgatgtgaatgacgactcatctgagactcaaagcattgaagaaatactgtccataattcaagaggctaggaaacctggtgagggtccaaaagttggtgagcaatttgttgggggcagcatggaccttgatgatattgatgcggatgctgacattgatgacattgagacaagcggtgattttgtctgtgcactgtgaatgggtattgatgatgcttgcaatcttgcactttgcacactatttctcccttaaaagcagtttaagataagatgttgcttaacgagatagatagatagatagatagggaagaatcaaacaaaacctctctaccatggtttttgatttgcctttgattagaagttagcttgtcttgttatctgcctatgtgggaataagggaatgttactgccttactggtttcttggttggtttaatgcttagccaaaaaatcaagctagactgtatgcatatgtaataattaataatatagtagtttgggtttatttctgttgcacgatccttcccttctctctctattatataaataaaataatttgcgatgtatcgttttcatgtaattattataaacgttagatgacaaattcacatttgaataataagtgatctatcattgtcattgtatcggcatcgtctaagagcactagacaactaatgtaatatcagcgatgctgatgcattatgctgtcatgctccttaaaaattaaaatactaaccttttgttgattctttttttaaaccgaggatatatgaatgttcaaatttaaacttaacctttaaaaaagacttggatgactagattatgatacaataacatataataattatactttattactattatttggtgcacacttatatatgatttgtctattgtattacgtgttatctgtatcgtgctaatgtattatatattttattgtcattcactgtcattattttactatttgtcactgttatcactcctccccctcttctttattgtcgcaaccattgatattactcttatctcatgatcattattatcactattataaccattattattcttattattgttgctgcaactattattattttaactcccaacacatttcttttatatgcaagtattaggaatcgaacacctgaccatgtatttaataagctaaattatttgtcagtcatcacattatgttggtacttaattcaatgataacaatttaaacattaatgggtagttatctataagttcatatattggtaattgttatgataataacaatttaaatattagggcttggattctaaatttgagttcgaataaaatatgagctatttagttcgatgtgataaagcatatgtattattgagcttaaatttaattgggtttgattggattgtttactactttttccaattttgttaaaaaaaaactcagagcttttcatgttaagaatttttgcaatattaatattttcagtctcttttcaaaaaaaaaaaatctggatgaaaaatttactaagaattaagatcagtcaatttttttagggattaaaagtggaaatcgactgaaaacgaggggaaatataattaaatcaattgtattttttcttttaaaaaaaatactcaattgtatattaggctaactacaatatattaaaacccatgggaactacgagtaaaaaaaaatcatattatttcgcaaatactctatattggaacgaactttaaggaaataaaaaagaagtttggatgggcaggtccagggatatttgggtcaggtgttgaggctgaaaagcccaatcaattactaaaccacacgatttgccaaaaccctaccaaaagcctaacggcgtaactgcccggcaaagcagaatcagaagcaatccgcgacgacaacaatgggtggtggcgggagaggaggcagatcccgcactcagagaaaacacttccgccagagcagagagaacgtgtggaagcgttccaaatcggatcccgatccttcttcaactgaaaacaatcccgcgtggactcccttcgccactgagaacgccgattttgatttctactacaaagagcagggaatagtggacccgcaatactgggaccaattcgttgcacttctcagaactccattgcccgcaaccttcagaatcaactctaggtcaaactaacaatcccaacctctctattctattctataactattctattcttctcttctctcattcgcatgtcgttttgtttcgcgattgcagtagccagttctccgacgaccttcgttctcaattggagaatgacttcgtgcattctcttcgcgacgaggtatgttacctgctactgtttcttttttctttttttgtattttttatgatagtgtttatttttggttgtgaactgaactgttgtttgcaggttgttgaaggaggtgagacggaggctattcggccgttgctgtggtaccctgggaacttcgcttggcattcaaatttttctaggatgcagctcaggaagaaccaaacgcttgagaggtcaatagaattcatgaatatgctactcccaaataatgaattgaaatacatgaacatgctacttccaaataatgaattgaaatgttatgccaattggtgcctctgattatgttaaatcttgcattgaaggttccatgaattcttaaagctagaaaatgagattggaaatattacaagacaggaagctgtcagtatggtgggtcacttcatatactctttcaatcttcatgatcatacaaagtgattttcttttattttagaattttgaaaatattgaatgctttagtacctgtaggttactaattgttctcctttcaagaattcaactaatgtcactctaatggttgtttgaaacataggttcctcccctcttcttggatgtgcattcagatcattttgtgcttgatagtaagcaacttctagtgtataaagtactttttattgttttaccagcccttattttatattgcttaatttggaattcaaacttcagcaattctgactattttatttttctttccttttttcagtgtgtgctgcaccaggttcaaaaacgttccaattgcttgagattatacaccaatcatctaaagcaggatcactacctgatggaatggtttgtgccgttttaattacgaaaatgttgatctgtttctttgccctttattccgtgttgttagttagcagcattttgattttcttgactaaagagttatctaatttcaacctgtaatgattgggccagctacgtatgcaacagtttttatcaatgtcttttttataattaggttatagcaaatgatcttgatgtccaaagatgtaatcttctcatccaccaaacaaaaagaatgtgcacagccaacctaattgttacaaatcacgaagctcagcacttcccaggatgccgtttaaacaggaattatgaaaggatggagttagatcacaatattagccaactgttatttgatcgtgttctgtgtgatgtcccatgcagtggagatggtacccttcgtaaggcacctgatctctggaggaaatggtagtttttattcctttatctagctccactttttatttttcttttcttttcaatctccaaattattttaatacctattttacctttttgcaggaacacagggatgggacatggccttcacagcctacaagttttaattgctatacgaggtgcttttttattgctttctgtttgtaatttaggtcctgccaacattagtcttgtgttctgtttccttgtatggtgccatcatcacagtcttttttttttttcagctagaaaattagtaatagccaacaggggttgtctcacattgaccttttgttcaagacatttgctttagacaatatatcatttcactaatcactagaaatccttgctgaagtcggtggtctgtccttgccttggatcaaggataacctcctctcaacctaaatttctttgtagccattgaaaaagaagattgattgtaagatgactttaagtctatgatatgcttgttagtgttttgttaactagcagatgattataaattgaactcaactagacttgtctaacatggacaattaggtttagttacaagatgttcatggtgacttggctgctctatactgtgtgcacggacagatccaggagtatatcagggggggtgtcgagctgcttgccccctcttggatccgtctttgattgtgtgtgtgtgtgttttttttaaattgacaaggatcattaagtgaaactatttgttcttccagattaagtttgttatgtaatttattgttctgtgcttctctccgattctttgaaagataacacacttgcattatgttgagcctgaaggaccagaccagtaatttttcaagaatttataaacacaaaacagtgattgtatttcagaaaaaatctggttttaaacttttaatgaccagatttgctgtcaggcactcagcacacaagggttttcccttcaagaagtattctcctttgatacacagcaagcaacaaaactacactctgaataatccaccccacttctagaacacacataaaacaaagaataataactgtccaacccacaattaacaaataactgccaaataaaccacacaaataacttccacgtaacctacacataacagttcagcacagaaatagtgagaattactgctaaaacctatttcttatttctcctgacatatacttacaaaggcttatgaccttccatcaatttctttaatgcactattattgactgaaatttattggaaaccacaaaattgtgtcttactccttatttaattagccttccacatgattttgtaatttccaattaatttaaaccaataataatgtgtaagaatgaaagtgttactaccactcctcatttctcaatgtatcattatcgtgcttattttgtgtgttctgaagatgacagacattcttacaccaaggaatagtttcatattatgtactttaaattgattttctcttttgctcattctaaaactttaataaacagatatactgcggttaaaaaactactgctgttttttgtctttagctaattaataagtagaaatgaactagggcttatgatatttttctaagattattttgtcaatatttactgaatatttctattctcaggtttatctctacttaaaattggtggaagaatggtgtattcaacatgctcaatgaatcctattgagaatgaagctgtggttgctgaggtaatcttatcttgaaagctctatactttgttgcagacgtaccttttttgagatttccccttaaaagtgctttgatatattaatattgagaatgaaaaatgggtaaaggcttgcaaattctatttgcttccacaacagcaggatatgacttaggcagttttgttccaccttttctttttgtttcttttcctctctactccaaaagcatcccattcctcattcactggtttggctgtttgcagcgtagcaattctatttctctgtctttcacttcctgataaaaataaatgaatgctttttctcccatgttacttgaattatttctctcaatctcactcccgacatttttaaaaaaatatttttggtggtaatttatgactaataatctgtgaatgaagtttatgagtatttatttaccactgatgtttttgcgtgcaggatttggcgcttttttcaaaagtgattatttgtagattttagcttatggaaacagtaacttttttagtcaattttttaactaaaaagcacttttcttttaaaaaaagacaaatgagaatgtaaagagaagctctgctcaattcttttttttatgccctcttttatgtcatgctgcaggttttgcgaaggtgtggagggtctgtcaaacttgttgatgtctctagtgagcttccacaacttattcgtcagccaggtctcaagagatggaaggtttgtgtttgctgtgatcaacttaccatttatttgttaagaagtcagaattttgaagaaaatatatgtaattaatgaccaaatatgttccctacctttacatcccaaatttttaatgtgtatctcatgtttgaggattatcttggagacaattccctcttacattatgtgatttgacaatgttaagggtggctggctttcttgtgaaaatgtttgtttcatcagttgtgttattccttgctatttgaattttgatggacttgaaatgctgttttgctgatttttttttttttttttgggggggggggggggggggggggaatgtgactggtagtgaattctttctaataaaatttttgctatttgatatgttggatgtccgtcaagttataccaacattcatgtccatggtatagaatcaagttttaaactttctaaaaagaaaattcttaagattatccatcttgaccatgcattcttatagaagctgttggttctgctttggattttgtttgtggcttcaaatgtggaaggggttaactctgttttgtagctgcatgcatttaatttttttttataagtgtttgattttggagatgcaggtatatgacaagggcacttggttggtctcttttaaagatgttcctaagtatcgtagaagtgtaattctttccagtatgtttccttctggcagaagccatcatgatcttgttgatagtagttgtagtgttgacccagagggtgttactaatggtattaacggaaatgctggagatggtgttcaagcagtagagaatcctgtgatgtcagagtctgctgcggaagtttgtgatgtccctctagagcattgcatgaggatactgcctcatgatcagaacactggagccttcttcattgctgtactgcaaaaagtttctcctctgccaggtagtttttcttatgactacatttgtttctctctctctctgattctgttaacagataattgggaaattttggagaacttgggaaaaaaattccaagtttccatttctgccttttttatgttcatttagtcacagacctttctttgttgccataataggttttctagttatttttctttattgcagcaattccagaacaaaccaaaaaaaagattaacgagcaatatgtagaaccagcaaaccagagtcttaatgatgcactagtaccacagattacttcaccggaaagtgcacatgaagaagtcttgaatgcagtgtctgaggaaaatgtagatgacaatgaacccaataccgaagatttggaagttggccctgttacatgtgaagagaacaattccaaggaaactcgagagcctgataatgtacaaaacacagcaaagagggttccaggcaaaagaaagctacaaattcaaggcaaatggaggggtgttgaccctgttgtttttttcaaagatgaaacaattattaatagtataaaggatttctatggaattgatgagcgttttccattcaatggtcaccttgttacaagaaacagtgatacaaatcatgtgaaaagaatttattatatctccaagtcagtcaaggatgttcttgagttgaacttcaaagttgggcagcaacttaaaataacatcaattggcatgaagatgtttgtaagtataatttatcctcaacttaagagatattgtttttgttagtattatattttatgtgattgatttatttattctccatgatactaattgtaaaaataatttatgtttatgttaataatttcctcattagaagcactccaaaaaacataggtagttagataatcctacagtcgtaggagattgatctaggcaagggaaacaaatttagttagaatttgattagtaaaagtgaagtgtataatttgtttgacattttgattgtaaagaagtcagtagactatactattgtttatggctactattggagttagagaatagtaattctgagtcgtttcataaattgtttcagtacctaggcatttatttctatttttgttttgttgacagtttttaaattcatgttgattttaataggatatggattacagtcatttgctcatttaactacgacatatgatggtcaggattaattatgtaatataataaataaataattcgtgtaagactgttttacataccaaatttctttttggaatattctaggatattacaagtgacatgcattctgctagttattggcaccatctactccgtttagtaatatttattggtcagtccttgactgcctgtgataaatgagctttgattaattcttatgactgagtgaaatatactttcatcttacaggaaagacaaacagcgcgagaaggtagctctgcaccatgtgctttccggatatcatctgaaggattgccccttattctcccatacataaccaaacagattttgcatgcatctcccgcagaattcaagcatcttctgcagaacaaagaagtaaaatttgaagattttactgatgccgagtttggtcaaaaggcagcaaacctattgccaggctgttgtgtggtaattctgtgtataggtatgtatcactgtcaccacgccattgagaaatttaatacccattggcatcaacatatttgtttataggaccttctttttctgcaggaaaaacagttgctgcagagtctctccaagtggatgagtcaactatagccattggatgctggaagggtagggcgagattgtcagtgatggttactgcaatggactgccaagaactacatgaaaggcttttaatacgttttgacactgaaaagggctcctctgggcatttggacaattcctgtaatgatgtggaagaagtacagcctgtgcaagagttgaacaggaaaaatgatgatgatgatgtgaaagctactgagttaaaattgactgcttaacagatattctttactctgttgtaagttgtaacagatatttgttctatttgtcatttatagaaatggtgattttgtccttcacctatgcaacgatagtgaaaaaattgcttgtttttgttaaccccgtcattatttttatagacagacgctggtccatatttatagttttggtttcttaaattgcttctgagaaactctgttgctgtatggtttagactttagaggttcaacatgagaaaattttataaagtcgttcctcgcgcatccaggttattattgacatgtaactggtagatttcagtcgaacttagatgctgtttattttactacgggaattaactctacaattataagcgtgtttggattatcggtccgaaagtatgttgggaccaacctccttttttaggaaacaatgatattcttacttttgtggtgaaatggtctcaggcttcatgctgtcgcaatttaaccgaagaaacaaacatgcattatatctaggtagcttcctagctacaatgcgtttttgtttttagtttgagatgcttagattgttcattacggtagttaacaactctagttcaatgtttgacgtacttttccgttggacatacagtattggctctgataggtctagacattctaggttgctggtagttgaaatcaattcgtattggatacattcaaattcaatgcatgtttgttactgcatctaatacgtgggtcagtggctcaaatcacgtcaaatatcaaaataaacttagaagctatatagatgtggattgaagtggacgtgatgggaaaacaaacatgctattcaaattgagaaattaaggatgtatttgattgtaaagaaagaaaagaagaaaatgaaagagaatatgtaagagaaaatgagagaaatagataagaaatgggctaaaatagagtagaaatagaagtgatttgattgaagagaaaaagaactaaataaaagaaaaatatttgaattaaagtgatttggtagataaaaattcatattaaataaaatatattatattatgtggtaggaaaatatttgtttatttaacacattgaatgcattataacaagttgatgatgtacgatttcatctcaaatttgatctcattgcaactaaaccaccaccatccttgtatttcttcccacttctcatcattttcatggtcttctcacacatttaaccataaatcttaagtatttttagcaaagagacaagaaaatgcaagcagaagtgggtcgaaaataagaaaagaaaagatatatatatatatatatatatatatatatatagtgaaaatggagtaggaaagaagataagaaaagagaaataaaagaggttgtttggttggcgggaaagagataattgattaggtgttcaggagagggtgattgattaagtgtctatttagatggacattatcaaaattgattttgaatggaatgatgtgatttatgtttggatgttttattataaaatcaagttaggaataaaattcagtacaaatttttgaatctaacgcaaaaactactcaaagttgcttcaacccaaaattaattatggaacaaaatcaattttgaatttttcttcaacatgaaacaaacatatgaaaaagtatccaaaatcaattttaaactcaatctatttttcaactccaaccaaacacacactaagtgagtgtgagtgtaattaatttgattatgtgttaagaggaagcgtaaagtcaatattcaattatgttccaacacataatcaattatgttgttgatggctatagtcaaaactctctttcaataagcaacataatctttttttttttttttaatataattgactatttcttgccatcaacgtttttttgtctatttatgcattttttttgtgaagacctacacctttttatttctttgctccttcatttccacgaagccaaatgagtcatgcttctcaacattccttcatttcttcacttttcctttcctttctccttctcttcaacactactaaacaagccataaaagtagaattcacttttagatttgtctttgatgtaaaatggatggatttttttattttaatctctttaaaaaatgttgttttccatcttcataaatttaatttttcaaatgatttaatagaactatattatcatttaaatataaattgtgatatataacaaaaatgttaacttttataataattattttaaaaatcatttaaaacatttttaatttattgactataaatttgtacattgatgatgtatgaaaattttcaaaataatctcttattatttaatgataaagtattaactttccaaacatatcatattaacaaaatctttaagatggcatctgatatgacatatttagttgtatgttattatcaataaatagttacaaaaatatttaaaaaacttccaaaatttacaaggacttaaagaataaaattaaaatttatcatatttacctaaattaacaaatctaatttaaattaaagtttaatgattatatattgacattgtcaaataattttacacttttattatcataagttactattaatataatttttaaaatagttaatatcaaaattaataaatttataatatataataaattgtgattaaataacgatttaaagtgtttatgcgtaatatccatatcttaagattgttaatttaacaattagcaccttattaagccattgcctttgtcttaatcctctaacaagttccactgttgatgacgttggttctggatttatgaagaaaccttgtacgtaagattgcaggggcttaccagatgaccccattggaaaaatatagcaatgttcaaactataagcacgaatgatgatattttcacgttcgataagttccaagtccacccaattcacctacaaaatgtatattgaaccaagcaattgttcaaaaaaagaaaaaaaaaagcaatttgtatctaccttcatttttagtttttaactcggcaaccaaatcaaattaaatttaaatgtacaaaaagcaatgcgccaaacctttaaaatttggtaataagaacacaaccatgaaatacactaaattgaaacaaattgtaaataaagtcaagatgattgacaacacatattcctcttagcagggatttcctgtgcagggcctggaacgataatcttctggccagacaaagatgctgagttcccatttccctgattttcctcagcagttaggttcttcttattgacaatgttgtatatttctgtcaagacagttatgaaggctgtttcaacattagttgcttctagtgctgaggtctctaagaaaaacaacccttctttctcagcaaattcttttgcatcctcagtgggtacgtcacgctggttctcaagatcacatttgtttcctgtaagaatgatgactatgttcttgtcagcatggttgcgcagttcttctaaccaacgtggtatgtgatcaaaggtttggcgtttagtgatgtcataaaccaacattgcccccacagcccccctgtagtatgcactcgtaactgctctgtatctgtatcataaaccattgaaaatgaaatattaggttaaactgaaatttggcatttaatgtacttgtaagtcaaccattcgaaccaccaagacatgataagaaataatcgtaattaatcatgtgaagaagcactaactagatataaattgcatgcaagaaaaaatagttctattctacactgttgataattactaacaagtgagaaaaagcaaagcatgtccaaactaattatgttagcaagtacaatttaactaaatgatgccccgtgctaaagctacttgatcaaaattgacaagttgtaaaacacttattattaaagtttttgaaggatcaacagcaacaataataataaaagctgttcaaaataataataataatcataataataataataataataataataataataataataataaagtctctggaagattgagatgataaattgtgaaaataaggccgataaaaaaaataaaagatagatggtgaaaataatattttgagatacccaaagcactcttcaagtctgaaccatttgcatagattgcccatgcagccaatttcatggatagtccgtcgcagcgtgttctgacttctgtctgcatgctctaaatctcaagatagacaacggttttaaactgaggcttgttgtacttcatattggaaaatcagttattttaaaatctcactaaatggagaatggtgactgctagttgaaaatgggaaacttaatgagattctgagtcttcctcacaaatttgcgcaactaatttctctatactatgtaaaacgtcacatcatatcacattaaacaacttatgcaataattcatgcattaccatctgtcggaatcccatcccaaaataataccaaaatttacacatgcatgcgatgttccaaattcagttttcattttccttttgtttaaaaatttattatttgtcatatagcttgagaatgtagagtattatgtgtcgagcaagaaaaaccaaatgcagagatgcatcagcttgaaagtcaacaactttgtataacgatttatcagaaggcatcagcatcaattccttgacatagatttatcataaaagattagacaatagcagtaacgatcgaccaaataagaaaagacaataacagcaaccagcaatgcaaatgcaagcttaaatctaacgggagcttggagttttaataataactgcatcattcacaccaaaaaaggcaggaaaacagtggcattgtggccagaaattcgttccataccgttgcgaacttcaaaaaactgagagggggaattaacagcatcccggcaatttcggtaactgagaatctgagaccacagtcacaactcaaagtcatctgtacaaataactacttctaattcaaacccagaaaatggtctacaatcattactgtagccacaaggtcaaggttttgccggtcttaattagcagctgcaattgcagccatattaacaatatttgtcaacaatttttcacaatatccaggattgtaacaaaactggaggcaccacaatttaaaaccttattcaaggttttacaaagttatttgcaaacacaactacagtccaaaatcaaggtttttggtctttactactacaattgtggccatataagccagatttcttaacaatatttcgcaatataaaatattaccatgaaactgcatgtaaactacaaaacggcttgccgtatgttttccactctagcaatactaaatggtacgaaaatttgtagaaagaaaaagaaaattttacgaaacagatgttttaatataattggctcaattgtaaaataaataattttttttttcaaaattaacgaaaatcacggtgataagcaacatatagtgttcgtggaacacgaattggtagcaataagaaacttcctttccacttaatgaatattattggatcgaattttccttgtttcgtggtaaagtcccgggactcatccttgtccatgttctataatctataccgtctctttttcctttacgtgcttcagtcacatatcaattaccaatacacaacgcgatgatcacaatagatcagctcagtaaccttagttaaaacacaaatccacgcgatcctccgccgcgacgatcagatcacgcgcgaaacgacgtcggtgacgcaaattaacagattcaaaccgaaactaacaatattaagaaactatggaaaacgataaaagttagttggaaaagaagttatagagtaccgttcttggccggcagtgtcccagatctgagccttaacggtcttgtgatcgataaccaaagtcctcgtctgaaattcaacaccgatggtggacttcgagtccaagctgaactcgttcctcgcaaaccgagctagtatctgcgacttccccaccgccgagtcccctatcagcaccaccttgaacacgtagtctatcctctggttcgcgtccccataccctcctcctgtacccgcacctgccatttcccactacactttttctgttcagtcacaataatatatcttcaactcacttacttgcacatacacatatatatagtgtctcgcttttggtgtttctttcgctttaaggttaaaacttaaaaccaattaaatgccacactctttttattttttttgttattgccttttttattaaaggaacacttagttgtttatttattatttattgtatatctctctcttaacacttaagtgatagagtgaaagagattgattactgatttcttaaaaatttgaatttttatgaaaattatgtttgggaatttggtgtctcttcctaattttcaacaaaaattaatttctgtttttaactgtgaatattaagtatgaatattaagattgaaaaaaaaaactcttatggtacactacgtgtgtgattactaggggtgggacacgtgtcacgtgacacatgcacgaatgaggtgggaatgaagaagcgcgtctccccaccaatgaatgagaagtggcaggtttgcataaagagttgttgggtgcttgtacacagagaaactgattgcggtgtttgatcattgatgattaatgaaatatgagaggaagaacggttgaggacagctctttggtttttactttcgagcgatcgcagcgtctacggttgcggatttctcgggtgagttgtctgattagtactgttgacacaaatacagatatttcgggtcatggccagacattaatgttgcaaataactatttaaaatattcacaacattattttttttagatcaactaattttatttttaaataaatattattattaatattagttgacacaagtgatattgatatctacctcttaaccaaatgatgtaggattcgaatcttaaaattaaatataaatatgaaataattcatatttaaagaaaatattcattttttattaataaatatttcatattaaaatcatagttaataaaataaaaatattgttaaattcaatattttattaagatataatttcaggagaggaaaataaggcttgaggagaaataaaattagaaacagttaggttaaatacacaaaaattttacatttaatttgtcctcaaactctaaagttgaagtcttacattttatcaattatatttaagttatattttttaaaattagtttaaaagttaattaaaagttaaaaagttagttgatacttgagagtgagtaattaaaaattgaaaaactaacttgttaaataataaatattttttaaaactaattgttgaagtaaatgaaaaatgtaaaataacaaaaaaaataataaatttgtgatttatttaagaatgatgactataaaaaataaactagttgaataacaaaccaaagctgaaagctagctaaatattcagttaacaaattattggttttgtagttttcagctaatttcatgtttggcaaaactcatagaatagatagttggaagctcaaaaaactaatttattaaattataaatacttagtaaaattaattattaaaatagctaaaaagtgtaaaatgataaaatataaataaaatcatgatttatttaaaagaataattagaaaattgaataaatatatttaggataaaaatgaaagaaaaatataaaaagttataaattataagttagtattttaaaaaacgctacttcaaaaatatttcaaaaaatattaaaaactactaataaattattaaaaatgtttatttatcgaatagtcaaacaagttttgtagttaataaaaaaaagtaactaattgaaatattttatcaaatataatctaagttcaatgaaatttcaaattatttgattttttaaacttaaattgaccaattatcaaattagactaaaataattaacatttaaattgtgctaaaaaattgtatccgaagtcccacattttattgggcgagattaaatctaagttgatcctaaattcgatgtgagtcatagtttacaacaagttagactagaaagtttagattaaatttaggtttctaaaataaggaacaagctatattgacgtttttgtgaattaaactaaatgggttaaagttcatgttcaaaaattaaaattaaaattatacagttcatcaaatgggtttagatcgatccagataaatacttaatacgtgtttcaagttataataattcaaaggccgtgttcaatttgattttatgaaataagattgaagtatggcaaaaaccttatttgtataaaattttggctagctaaacccaaattgagctaaaacgacataaaagatgaatctgttccaggttctttattattattaattatttgtatcaattatggatgtttttttttttaatgcgtatgaatgaaagacatatattaaaaaatttataagactttctagattcacttggttaattacggatgattaatactagtaaattaaaataacataacaaaattaaagaattgtaaaaatcaagttaactaaattatctttcaaatataaaagttagaattgattagatccaaatccccgctaaaagacttttagtaaaaaattctatattatttatacttatttataaactttattacaaagtattgaagttcatttttgtcttttttatttttttttgaatttggacataaattataaggagggacgagtcaattcaacaaaattaaaataataaacatttaaagaaattaattaaactgaaaatatttttaaatcaataatttaaaaataataaatccaaaattctctatacatataacatttttgtttattatgaagtttcttatattgtctcaagttcattttattcaccttatgaatttggacctaaattataaatccgacagttaattgagaattacatttagaaaataaatatttacaaataaagtaaattataaaactgacaataaatatttattttctaatatacatcttttagttttatctgtaaattagttttcaataattaaaattaacttttatatcacaaactaattttttcgttatatacttaaaatataatttatatactaaaagaatatttattataaaattaaattataatgtaataatatattattcattataaaataaatatataaaacaaatttgataaaaaaattatgtaaaaacaaatattgaccgcaaatgctaaaaatgatcctgtagtaaaagtaaaactctaacatgtttggttagatgaaaagaaaacagctaggaaaatttcaaaattttgaataagaaagaaaatgaaaagaaaaaaaattaaactttttgtatttacaaaataatttattttctttctccaaacaaaaaagaaatattttaattgtattttttttattctttattttttttctctcagtttctctcaacgaaccctaaagtctaaactccaccgaattggaacaacacagtgtgattccccaaataaatacagaacaagaaccctaatttacattgcaattgtgttggtaggaagtgtagggcagattgcgtagaatcggaagatggaagaggaagagcacgaggtgtacggaggagagatccctgacgagggagagatggaaggagacattgacatgtccgccgccgacgatgacgccgccgtcaaggagctcgacgagatgaagcgccgattgaaggaaatggaagaggaagccgcagcgcttcgcgagatgcaagccaaggtcgagaaggagattggcagcgttcaaggtttttcattatcctcattttaattcgtcaactttatcttatactctttcgatcaatcgctattcagaagcttaatcatattttatggcaactgataaaacctaagctcaccaggtctcgaataacagccacgttaaactcatcttttgtgattattgataaaacctaaaacacggcagagcttgaataaaaatctcttaaactcttgtttctgcgggaaattgtggacaatagcagttctcctgctatgtgctatactgctgtagcatttttgggtttggcccgcatatcactatttgaaattgataattatgattagttcctagtttctaaccaaggtactttatttgaaatatttttttttatatttacattccttgactatggttaaaatcttggcaaaacatgatataaaataaaatgtcttttgctgagatatgcttttgtgaagtcttgattttaccaaatcacgtgactactatctaaatagagttgcatcattattatttttcaacttctagattgaatctgttttgcagatcctgctaattcagctgcttctcaggcaaacaaggaggatgcagattctcgatctgtttttgttggcaatgtataatcctatcctatcctgtttttttttatttttttttatcatcattagtttttcaatttgaatcttgatttggttattatgaactatatttagtatttatttagaagtcttattttgctcatattgcatgaatgtgaattgcagaccttctggtttgattggttgaactaataaactgatctgccaaatagtttggtcctatcttttaaccgataacttacaaattggctattaaaccacctaactgaggatgaattggtctgaaatttattgcccttgtttatcaccagggataacagacttgtccaaagttaggttatctattcaattaatatctcaatcatctgttaattttgcctggttttgaagcattctgtaattctattagttgtgtcaatagaaactttagttgaatggatcttgaactgaattctagatgcttcttttcattgtattattttactatgatatatttgatactgctttttgttttgttttggaatgaatactgttaaacttcagagacaaggtttgacttttgtctgactatgatcgcagggtcattcttattactcaggttctataattagcgctgggaatctgggatgcttacattgtattttgtgtgtgggacaatgtaattggtgtttcttagggttgtattagagagaaaaaagaaagtatattgtgcttatgaaacttattaagatatcacatgaaggaaaacagacaaaaaaattgaggagaaaaaaactaagtttatgaaaagaaaaaaggcaagaaaagaaaaacattatacagaagaaaaaatagatcaaattgagaaaaaaaatgagaaatagaagaggaagagaaagaaaaaataaagaatatgttgaggaaactgagtagcatttcatggatggctcaaactggtacggctggagtagaatgtgttaaagatgcatcaactgcactcctggaggagacagcttgtggttcttttggaagaacattctgtgagtgttgggcatgcaatcctagtcatagagccctattgttgactgcagtgaggtgtgtggtgcctttgttgtgtcatttggccaatgtgccaatgggtatgcagctgctgcttgcctactggccttttatctcgtaattgtttttcatctgtgaattaaactacctgatatttgaggctttttctttctcatttcaagttgttacacaaacattaagttgcaagtgaatgattattttgcattctgttttccctttactcctcttctatcacttcttacaaaatttgattagtgcaatttatacagaaagggttagaattctgacttaatatgtttaaggtttagggtttagtggggacaaaaaaatagtctaatgggtattgagttacaactaataataataataagttacacttagttaccaagcttcccaactggatttatacagaagtttttacaaagtacataatttcatgacaaaaaaatctaaaatatctaagtttctatacattacaactaccttctacacatatcaatgtattttctctattatctcttataaatttctaccttcattttaataaacaattgtctaatgggggcatcactatttttcttgtgtgggcaattttttttttattaaagatgttaagtaaaaaaaattgcttgtgggggcaattgcccccataatgctgtgagtgcatctgccactgcttgtagaccagaaaaggttgatgcgattgtcaatttgctatgaggaggatgaatctaaggagtagaaggcaagagttttatctagagtttgagaagagcctgtaaaatgactatgaacatcaattaaaattacatctataggagggtgcattgcttggttaggttttgtgtttgggattccatcttgtttggagttggtggttcatggagttagaaatgttgaaattcttctcatgattgagttgggaaaatgcacatttctgttgatgttgtagttagaaaaataattgttcatcaatgttcgagatataaggtggcctggcatactttttttaaaaaatagaatgagtcagtttgaaagtgtttatggagtaagaattggtggacttcttctgttgtttggggagttgggaaaatgcatatttctgatgatgagttgcactaatgtttgagatctaagcgtggtctgccatcctttaaaaaataaaataaactgagtcagtttgatttttagggtagaatggttatgttctgatgttttcagaggtctgtcctgaatttatatgcttttattgtgttcctttcttagagacaagtaataatgtaaaaatatttcgctaaaaagagaagtaataatctaaaagatagaattgaaggataagaggaactatgctctggagtttctcatatgaattgtcctgagcaatttattgaattccccattatattaatggagaattctatacagagtggttgtaagtaaagatatttatttaacattataaattttactaacaatattattgttcatatgcaatctgtaattttggaatctaatttcttatgataactgaatcaggtttaagccccttttggattaacatgatattattggcatcaaaactccttgaaattgatttgtgttttacaggttgattatgcatgcacaccagaagaagttcagcaacactttcagtcctgtggtactgtaaacagggtcactatcctgactgacaagtttggccagcctaaaggttttgcttatgtggaatttgttgaagctgaggctgttcaagaggctctcctgttaaatgaatctgaattgcatggccgtcaattgaaggtacattgattcaattgtgttgctatttgaattactgttttggttgctattgttgtttcaatcagccaagaaatcattcttttaaattagttgtatttaatcatttggaaactttccaggttttgcctaagaggaccaatgttcctggaatgaaacaatatcgtcctaggcgctttaatccttacatggcatatggcttcaggaggccatatactcctccttacttttactccccttatggatacgggtatgttgtgtgactcatttaatttgcatgttatgccctctgttgttttgattgatgttttgaattttcgttcattttccattaaatatcctgcaggaaggttcctaggtttagaaggccaaatcgttatatgccgtaccactagaagtttcatgcggaatgtgtcatattgggaagatggagcatcctggagcataagttttttgatttgggcattgacactatcttcattcagtattatatactctgattgagaatattactgtgaatttgtcttaggatgctcgagtttacatttttcttgcgtagttcttggaagatggtttacaattgccattgaatattatgttagtgacttttcagtctatggtttataccaaccaaagatgtaccctttggtaaactcatcaggcctcctcctctgtccggtggtaccaaaatttgatcaaattagagattgaaatatgaatggcgttttactggacattttgggtttatgatttatggcatataggtcgtaagacaatttctatcttgcgccccccttcctttatagtagggtgtgttcatataactggttttataaaatttaaccataattactggtcctatgctagggaacagtaacgtggagtgtgtttaaaagagtgagagtttgactctagcattcctcttaaatacaaacgcctctatccaataaagaaagaggagaccgaggaagcatttttaaagtgtttttaagctctaattctatgctggctaattgagttttgtgatttatcattctgtctatgtccaaatatttaagaaaagtaacagaggaaatgatttgtttccattcaggcgagactgagaagaaaagaaagatttgagttgacttttttggttaaaaattaaaataaagcacggtaaattttgtaagttttgttacatgtgtggtgctaaaaatgagttgagtaaagcttaaaaatcatcacaattttataactggctatctcaatatcccatacttaaggggctgttatagcttataaaatacttatgtataagaccgaaatgttgcagcatcaaggggttgtatgcaatttatgttgatttcaaactatattaaagtcaaaaagtctcaaatctaacaattaaagaaaaaattaaacgaaactatttaatatacatgataagtatgaaaatttaatattaaaatgattccattttttctacagtattatcttgctaagtatgaaatattcatgttttcattcctaattcttatatatatatatatatatatatatataatattaaaaaaaaagtttaaatatgaaaaccaattaaagaaaacacttgaagaagcaaaagggtataaaagatcacatttcccaaatgctcttgaaagaaagaaaaatgtggacaacatgatgaaatcctagttcagctactcagtgccagtggtgatatggagccctgcattgcatatagtcgacccctcgaagctatcgtcaccaaagtgctgctcagaaacctaccatgatatgatatctcttctataaccatactcatactccaatcaatgttgcttcttctactccatactcactaacgcaattcgccacttgcaacaaacaatgctactcacttgttaccaccaccccttccctcattcggtttcttcaacctcaacccactcactctgcaccacaaatagaaacggcaacctctctctctctctttccatcgtaacctcgcgtcctctccacctcacaacgcaaaaccttaacctcaccgctcaacgcttcaattccctcactgtccgcgccgactcatttcacctccgatccgaacatgtcgccgtcgccggcgtttccaatttcgactctctcctttcgctgctcgagttctcgtgcttgctctcttccgccgtagcgtacgctgccgccgccgtagtcgcgggttccaagaacgagctcctcgcggggatcggtaccagagctgctccgttcggcggtgcgttgcttgtggtcggggttctagtcggcgcatggattcggaggcggcagtggaggcgcgcgtgtgtggagactgggaagggcgggttggaagtgaacttgctggagaggattgagaagttggaggaggacttgaggagttccgcgacggttgttagggttttgtcgagacagctcgagaaattgggggttaggtttagggttacaaggaaggccttgaaggatcccatagctgaggtaactacctctcattttgctacactagttttgtgattctgctttcgcacgtgttcgtgtgtggaatgtggttggtgactgagtttgttgggatttcattcgccgagcatagtgaggaccatatatgcaatgcatcattggcaacttctaatggttaaaaaattataaagtaatgagaactgcgcttctgaaagtgtggggtagtatggtgtgagtttgtttgatgatactgataattaggttgagtgtatggttttagtgtaatatgaagtgagtttgcttgatgatactagtactcaggtcaagtagtagtgagagcaagcctaaggctgatagtaaaatagctttgttattttaacaataagttgctgacaaactctgaagattatgatcctagccaaatttggcagctcttcaaattatataattcataacaaaaagacataaataacctatattttctgcccaaagtccttataagaaaaatagattcgtggaaccatcactggattcagttccatagctgtagtcaaggatcagctttcttaaaaacttaagctgttaggtagaagcccgtgaatggtttttatatcttgctcacttgcttagcctagagccctttgagcttgtagtatgtgctatgcacaggcttctgttatcatgcattgaaatttgaaatttaactttgtttagagtgaggttggcaaggattggactgcaatcctaattacttggttgcacatcagggattagagaagattgatgggcatcctgttgaagcaaattacactagcttttgtattaattttatggattggatgtgaaaatctgtcaatatgtgcgctgcggaagtgcaaccagacacacatttggatatagataccttagaatcactttaaattctaaaacttctcccaaaagcttaagctgttaggtggaagccctataaatgggtttatatctaccaggaatcattttaaatactagaactttcatctccttcattagattttggtctttcttgaacatcattttatgtctcatccaaatcaagctccatctctttggtatccttttgctccttactaagctgtgttagccatttggctcagatttcaggtatttttacttgcttatttaacaccagctgcccttgctagttgccattactcatgtatcagttcttcattgtcatccccatagaagtctccatcttcaacattttcatcaaatacatggttcaatacccatctttggtgacattttcatcaatattgaaatcatgtttggacacctgattgctttttgtttgtttacaaatttggtttgtttacaaaaccctaagctgctaatagtcagtgatcacattttttttagaagctaatcagtggacgcttaaaaccaattatttgtctttggtacttctaaatgaaatatattgttaaatattctatattaacttcatccatattttttttaatatttattttttgtgtctttctgtacacacacacacacttaaattctgcattgccattttatatcatgttggatacaatacacatgacatacccatatggccatacctgtgccgcaggtattgattaaactcatgtctatggtgtagcatgtactgaatttcatgttatttcaattgctagtacaaggaaatttccaatgtttattttttgtttgtaaaaattaagaatatgtacactaaatgtttattagcctacccttggtaacataatggttgaagtttaatatattgaaaaatctgactggaaaagatatctaattatttgttcatttctttaagactgcagctttggcccagaagaattctgaggctgctagagcattagcagtgcaatcagacattttggagaaggaacttggtgaaattcaacaggttttactagcaatgcaggtaatcctcccctcccatgttatttaaactctgcctgacagtgcaggcacaatttacaaatcaaatgtgcatgtaattgtataatataatttagtttaaaaatgtttttggtctctatagtgtaggctatctcttgaagggtaagtggtgtatcgctgatagcaggcaggaactaaaacataaaagggaccaaaaaccgaacttataaaacataggggccaaaaggtccaaaaccaaatttgagtagactatagggacacaaaatgtatttaaacctataatttacattcacctctctattttttagaagtatgtgggtgtatgtaagcaaactattggcttgtttgttttaaagttgggtagaattatgggcgttaacatattcaacataattgggatatgtattcaaattactctgtcacaatcaagtgattggacataagtggttaatgtgttgaagttaaggttgaatcgtttaggtagtatctaagtttgattcttgacggaaacaattcttggtcgaactttacttaccgtcccagctgaactccagattaatcagggtccctttctcttgatgaaatcagagggttaagaccaaaagttactcacaaattttgctcttggaacatgtgcattgtgggaaattgattcttgagtgtaaaacaagtgggtgtattttagcaatccccatccctctcctcctccccacccatgctaaaacacatcaacatcaacaacacttttaactcaagttaattgggggtcggtggtagatggacccaatgatagatcggaaaaaaaacaaagaaagagaaaggaagataggaagaaaaaggggaaataagacaaaagaaaggaaaaatgagctaaaataaaagaatggttaaaggaggagagaaatgaagaggaaaataactaaaaaaaaagaaaacgactggaacatagacataataatgagttcaaccctccaccaagcttaaagtttttctccactccgtcgttagacacatcgtctgccaatctatatttcactctatttggtcttgtttaactgcttttccccaggtgagtttcggttgacctctgcctctctttgtgtcgagctcttggtaacaaactcttgctctcacaggaacatccagtggtcgtctcataacgtacctaaatcatctcaatctatgctcccttttcttttcacacaccagaactactgttacctttcgtcgaatatcctaaatctttcattgtgttcagatatatcttttttaattttttggtaatgtaaaaagttatatattgaccatggatctagtttgaccgtatatggctcagtaaaaattttcttgactgctttactttccaaggtatcctcatttttttatagttgagtttgaattgtattggttgtgtctgagcgttcatgtaggaacaacagcgaaaacaacttgatctgattcttgcaattgggaaggctagtaagctatgggaaagcaagcacgaaaccagtgaacgacatgacacattagaaatgtctaattcagccgaggatgaggtaaaacaggaggtgcaccaaatatgaagattgggttaaagtaaggggaaattcctgaaatttcaaagtggcaaatcgtggagcaatatttttttttttttttttgtcgtgtacactgaatcatcaaattgttacagaaaatcaaaattaccagaattttatcagcacataaataatgattactcgtttttccagagtacctcaaatttgttgtggatacaggtgagaagagattacacgagagtcaagacaaactaatgtgggggcatttgttgaactctgtccagttatagggtaaaagttcaggaacgtatctgttgggttgtgcatgtactttgaattcaagtttataagctgttctccatcaaacatgcttatgttggtagttataaaggctcggtatcacatttttctttctcccctgcatgtttctgtatcatattaaaatgaaccttcaaaattcattgataaatattgaaaatgttgattggttaaggccgtgagtaaaggattcatatcctttcaaggtaattacccaaagtaaaatctattcgaggatcctacacattgaactctactgttgacagtggaagaaaaaaaccccttaaaattatggatcttaataagattttatggtagaaagacctttttatcccttgcgatatgtttctataatcatcatttcaacgaatggtttctgcccagcctttcgggtccttctgctgcttaaccgattggtcctattcgaaaagttatacataaactctggattaaaagaaaccagttatttctctgctatgttcaaattggcagccctcatgaagaatttgtgaaactcaactgtgatggggctttgaatttgcaaactaagaaggctgttgcaggttgcttcctaagagatcacctttgccattttatagtaggcctcacgtcatctttgggatcatgtaccgtcataaaggcggaactttggggtattcacaagggaaagggactacagctcacactatctagattctagactctagaggtttcaagaggattttagtgggagtgattctctggtttacatttaatggaacattagcaaaacgttttttccaacacactcttatatgtagtgcatcttttggagaaataattattttttgttaacttttagaaataatttcaaccaatgtggttacttgacttggtgaaatggaattcatataaaatatatgtactgcaaagttaaataaaaagtagatcgatcttgcctagaatatcctcactaaaccagcctcccggctaaagttaaagctcttatgcaccttccttcaaagaacaaatagaatttggtatagatgttctaaaattcattctagacaagctcagcttttcaaagttatttacggggacatggtgtagcacaatcccgtccgtgcttctttgttgatgtatgctctcactgtaatatcactaaatttaattaaggtattttgggtgttatttgtgtaattaaacggatttacgaaagtaaaggctgtttggtctttatcggaggtacgggtgtagttagtaattgttagacgcacccccgggttcatgttcaaaagaagcagaatacgttttctgccatttgctcttttcttcttttctggtttctcctcaatctcaagctctcttcttgttatttccacttgattagtgaccgaaatcacaaagcaagcaagaaagaaagccatttttccttgttctttgttgcttttgagctttggtgttggtgatttgacgagaagagtgggttttgaatctacccattttcgttcggcgccgctgaaccgcgattggaagccatagagtgctggtctaccatccattttggtctattgaactctaaggtttgaaatttcctcctatttctccttgattcttgaggttagggttagggtttggagtgagattgatgaatgttgagttttaggagggtgggacagttttgaagtatgtttttgagtgggtagaagttgattttaagttgatatggtgttccatgcataaatcatgcatgcatgttcatgacagtcaagaacacctatttgggcagttctggtgttttgtccataacaggagttatcggtgtccaaatgatctaaaaccagtgccatttgaaagctaaaagagttaggtctattctggaattttcgtgctatttttggagactcctagaaattgtggtgcagagttattataggctgttatactctgtttttagcagatttttctgttgcagaggtccattttgcagaaatcttaaatctgtctaggatgatccaaatcgagtgctttcagtggcaataaaaagatgggtatgtgaacttcatgcctgtaaaatatcagctcatttggacgagtaacctggtgtgggctgttgttgaaagatggctgtttgaattagtgtgtttctgtcagaactattttagtgcgtgacagttctggtttttggtttgctgtagaggttgtggttcatgaattttgatgaaaccagttttgtttaaaatatgagaggtaaattttgatgcctctaaattctcgtgattttaggagcttcccacatggatttgtgatttttccaagtgggtgtaaaatctgcagaattttatgcagcagtttatgtttttccgtatgttttgctagaaatatatgctttgtacggataaaatgatgtttgatatgtgcttgtgtgcctttctatagggcgtgacaccgagggtgtcagtggcgtagcccacagtgttgggactgaattgcaaaacacgactttgccaggtaaattcttggtctcttggggatgtttcctacttgttgtgttccaccacactccgagggagtgatggttgcattcatgatgcattcgttgatggttattgcattctcataatgatatgtatgcttgtatctatgcttgtatgtgtatgaatacctgtgattagatcttctgcccagttagatggatatggacctctctaggagaatagcgcacctcctaatttggtttgctcatggttgatgatgatccctgggtgatgatgatcccttaaaaccaagagataggtggtcccgtcgtggttgaagcctattctcggaggtaccatatacgtgcgtccatgcgtaaggggtagctccagatgggatggcacgggtgtgagttccgatctcacactgaggttagtgttgatgatgatccaccgtacatagagtaagatgacttgcttgtattgttatgagggccgggaggccagtatgtttgtgatgccttgatgacgcgtgtcatgaaagtgagccagggtggaggaaatgccttcaaggaacctgagcttactgagatgtatatctcaccccgtgtggggtttatgttgtttcaagtgactcttatggtagagaggaacggtctcagggcgggaggccccagtagagacatttcttgcatggatgtgggctgcaggatgagagccgagtggctcgttttggcttgatgcttgttttgtacctttatagagggaagatgtgtgtgtgtgcacacatgtattcttttgttttgtacatactatgtataccctcgtgtgaggaaagatctttgagatcaaggcgatgtatgcctattcttttgtatggacactgtgagtatcaaatgatgtttatgtacataactagtttatgttatgtaatgatgttcctcctatttatatatgttgagatatttatgattatctgcctatggttatgttcttgtgattctggatcagcaagagctagtgaggctgtgatgtttaaattttatgagtttcatacataatgtaatcaagaaatatggtttcgtatatgcttccgcaagttttaattaaagtttaatgcgtcattctgatataataaatgttaatacactgggtgctcacggggtgttacactcacgtttcacatgactgatttaattttgggttaatctccattaggttttacatttttattctccttttaggtagatttttaactccaaatatttaatttaatgcaactgcatgttcataacttaaattaaaaactatttgattgaaaataactttacaccaacagtggttaattgtatataatgtcgaaacttagttaatcattattagattataaagccttatttaaaattttaaataaattataaaacttataaaaataaaggttaataatgagttttaatgcttacaaataatatggtctcgactaacaaaagttaatttaattggtaaagatagaattcatatcccacaaaaacacaagttcaaattctgaagatgatgtgagggttttattggtagataatcatatttgaatacctttgtaatcgtttggtgaaacttgagatatactacgatcttggtgagctcttcagattcaattcatctaactttataatagaaaaaaagaaagataatatgatgtcggtgaccatttattaatcttttaaaatttaaaaacttagaaacttgtctaaaccaacgacgacgttaacattagttttccttttgtaagaggggatgttaaacttgtctaaaccattttttttttcgggtgctacgctaaactggcttggattgcctacaatacaaggctacaatgcacattgcatatattagcttcctggtttgtggtcacaattgtcgaaactatcaacgccgctaaatccgggattgcatgtgaatgtgtgtgaacccccacccatagagtttgttttcaaaataataataaaatgcatattcagtattcagagcaagcaaggatttggatttggaaggtacattaaaatagatgtaagagaagcaagctgagtgtccttgtctttcgcgcgaccttttttctctgctaatggtaaaaataattgaatcatcgattaaaaagcaatgaagcaaagaaaagattgctgagcacatcatttgtgactggtggagtttttagaagaatgggtaaaggctgtacaaaatggaaagattttcatttttgcagacacatctttttcgtccactcagtggcaaaaatgatgcgtagctaggtctggtcactcacacagtcacaatccctctcagtgcaatgtcaatactctaatggcagctttgactaattgaaagctgtagagtcactgcaaggaatcccgaaacctcgaaaaggaaactgaaacgagaatagtttcacatgccctgaaactcatttggtgtgaaatgctttcttgatgtgtgctagatcaattttagaaagttcataaacagcttatgttaaaatgtgtgtttgaatgtatgggaattttcaacaataacctatgtactaaaagtgatggtgttacacaaaagcatcaaagcaagaaaaaaatgcaattgttgttatcattatttcattaatttttcaaattgattcttattgtgtaaatctttttaacaaagttttacacttccatatatttttaaatgaatccccacacgccactaaataataatatactttagatttcaacagtttaatacggaattaaggcattttggtctcaattatttttgcagcagaaaaaatgtcgacaccattttcctaattgtgattacaaataattatgtatatcttaggcatataattccgttttggattaagaagttaaatgaaatgagttttgatttaactgtagattttttatttattttctaactaattatctttcattattggatcatcttattttgagataaagtgatatctttaactataattttatatttaagttatagattaaactttgaaccttaattaaaaaatttaaatatgaaaccatttgatccaataactttttttttaaggagtaacaggtacctttcaaatgaacttaacaagagtattaactatgggaccacttctgcagaagttctatttgaaagaaaataggcaataaatacccgtacttaatcattcaatttcattgtcctctgtacaatatacaaacttgaggggtcagtaacagtaattcatactttacatgcaaaaaatccaaagtcctccatttgattgattcgttagtttaaaagactagtgattccattatgcaatgttctacgttgtacaatataagaaaaaaagatattataattttatatatgtaaaaaattatttttaaatttaaatttataatcaataaatcattaaaatataactttatcattatattcatcctcaaataattcctgagtttacaccacatttttctatagcattaacaaagacaaagcacacaaattacttgcactagccgccataatcaggtgtaagtaaagtaatcaaagtcaatcacagtcaaatagataaatcactaaactgaaaactgagacaaaaattagttagcataataaatgccagtttgaactatccctcttgtctgtgatatttttaagcacacagaaaggacaaggccatttgttatccacgcagtttctaataaccaggctcaaagtctcaagccctcaaactacttatagaacactgtccaagggggccccttgatactgatgtggattctcccaatttgcttaaccctctcgagtcgttcctttcactttttctgctacagtctgcattctgcactgcactctttctctctctctacttgcttgctattgctgccaacacatcttccaatttatgtacctctcttttcctcattcttcaggctatacgccatgagaagaaaagcactactctacactggaaaataatagagtaaaaagccttcttccttttgagttttgatcttttctctctctctctgtctctctttctctctcttggttgggttcttcttcacatcacaacctgataaagtttcttcagaggattggcattcggatctcagttaactcgcattaaattttaccacccaagctagttttctcttttagatggggaatgacttcaaggggtggtgacatgatcatatgcattcatggcttcacttaattcatatcattactacacaatcgcctccttgctcattatacttcttctccataatttgctctctctatctctagtttctgcctccaatcaccctcagtctgcaatttctccaagggtaagctttagtctaagccatgtttgtttatattataactgcttcaagtgtgtatgtgtatgtgtacatggtctaataatggagggtatgtacaaaattaatgtggtttgtttgttatgtgcaggaactgttatttgaggagaaaaacaggctaggttcaattcctcccagctgtcacaacaagtgcaatgattgccatccatgcatggcagttcaagtgccaactttgccaagccatgactctaatcctccagatcttaccaaaactgctgcgatggcaagttttcttaacccttcttctccccaaggcaacaggtactccaattacaagccattggggtggaaatgccattgtggtgaccacttcttcaacccctagaaatttgtaaaatgaccctcttattttttgttggttaaattttaatatttgtggcttagtggtcagctagggtaacagatttgcgtacgtcagcatggatcctatacattagagcttgatacacttgtacagagtttgttacagacctcatgaatttcaactttattctgttgcatcttaattttgagaaagttacctgttcctgcttttgtgtctgttaggatcatattatttgagttattcttcattttgatgctcaatggtccttcacggttttatccttaaaagatgttttttaagcacaaaatggtccttcacggttttattcttagaaggtgtcttttaagcacaaaatcatgacagaccattaagcaccaaaccagataatatacctcggatgagatgcacgaggattagaggtcggagcaatgtcaaacaagaacagatagcaagaggggttgtgttatgtcttgtccattgcaaatgtcttttcttttccctgatttctttttggtttttggaacctattatagtgcgaatctgtctcataagtcataaccttttcgcctaacttggaattttcattgcctgcgagatggtacatgttcacaccgttgtttttatgtgtctcgtggtcctatgagtgatcccgccccccaccttgtctgtttactcattcttaagtgttattagagcaaaagatttctctgtattgaattttttttttttaaatattgtcaaactatttttaaatataaattaatttttttgttaattatgttagtgatataaaatatttatctattttattgatgattaatcttttttagaaaatttaagtgatcatatttagtggtcaacttttcttctcttaatcacattttttttaatttgattttaaatattttatttaaaaagactaaatttaactatccacaccaacgatttattgatatataaattaatttatctaagttcattcttaattagaagtaactttacaattagtgaactaacaaaaaaattaaccaaatatgaatactttatttataaaataaaatatattgaactcattttaatattatatatgtttaaattataggttttttggagttaccatcttatttatacaaaataatacaaaatattcacatcttctgtggatgatcaatctttgtctctcctttcaatttctttttcatttgcaaatttcgaattagaaatcttgcctaacagcagttgcggatcttcacttggcggaggagtcatgggccccaaagttttttcttattatatgtatttactgttttaacacatgattccctctttgtaattaaaagattaaataattatttttgttattgaatatgtaaaatattgataaattcgcttctaagaaaatttaaattttagtctttaaaaatttaaaaatatgacaaatttatctatttgttaacttttgtatgatattgttaatgaaagagtttaagattaagtttgttagtatcttatatatttaggattaaaaatgattatttatccaaaatataatttttttatttttttcttaatctttacaaacataatactacaataaatacttaaaaaaatagaaaaataagtataagttaaaacaaatataataataagcataatatttattaataagcataatttgtctattattttgaagtttttgaagcgacgggtacattatttcaaatatgagactcaaataaaaatgcataatcattaagttaatttttacaaaaaatgagatctaatttgattttgtcattatctaatcttgtcataataacaatttcagagcaacaaatagattatatttattatttatttgttctaatttatgtgtgattttctatttttttaagtgtttattgtaatattatttttttaatgattaaaaaagggaggaagatgaatattaaataatattttggataaaaagtcatttttgtccctgattatatgtagagcattgacaaattcgtttttgaatgtatcacgtatactatttcatttcattaaccataacgaacggaaattaatagttaaataaagttgttacactttttctattttgagactaaaatttgaatatacacatttcaggaatgaatttataggtgttttacacaacaaaaacaaaaatgactattcattctaattaaaattatatatgaatgttatatataagattaaggcgctgatataaattagttcaagacaacatcatgatatattaaatatactagtgaaaaatatgaagtaattgcaaaagtgacactactagtacagaattttactgagaaggtacggaagttttcaaagtttcatagattcaagtttcaatcactatgaagaaacgagaatgggtgtggatgctatgttactgtaaagaaatgagaggagaatgcttcttgaattgttaggctacagttattaccttgaaaaagaaactgaaagaaaagagtgcagctgttgcacttaaaaaataagcaaaaatgtggtctttgtaattattgaaaaatttagtattgaaaaatttagtaggaagtaaatgaaaatacattaggttaataatttaaaaatatattatgctagttatattataaaggttaattttattctctttatttccttctttctcctttcattctttttttcttttagtttattttttttgtcttatttttcctttttctttccttctcaattaatctttttctgttatttataatctattattaggttcatctatcactaatctcaattaacttgatttaaagatgctattaatgttaatgttaatgttgattatgcttactatagagtttaattattatttattatcaaaatacaatatattttgtttagttttataaatttatgtttgaatttgcttgaatatattgttttacttaattcttaaaaaaaatattgttttacaaagtgtaattttggattttgagtagttaaacatcatttaattatgttggtcccttaaaataattcgttaagagagtcaacgaaagttagattcagcaaaaagattagtcattcataatatagtgaactaagatttgatgaaaaagatatatgaagaagtcttaccaggaaggaaatttggaagtcatattgattttgggttgataatctgaattagttcgaattttcaattgtttctcaataaatcaatgataaagtggtcaactgttaactgattaatcgtaggttcaaatcctatttagagatttgattgattcgaaaatattaaattcaggcttgaatagaaatgactttgaagggatatccgtagaaaaaaaagaaaaagagagggacaaggtagagaattaaaaatccgtttctgtacacatgatcagccactacaaattatgagtattactattgagtaacgggtacgatgggtccaaggtgtattttttattactcagtagttatttttcaagcaatttggttttcagaggctaattaattgaatgaaaatatcatgtctcatccaagtccaattcgctgtagtagaggacactttacatgatacaatttatatcaaatttctcatatcatattatcaagtttttaaattaaatgataaaaaacgtgttttataataaaaaaatgttaattaaaaacgttttattaaattgaaaaatttatttttaagttaaaaaattaaccgacaatgatataaatgttacccatacaaagaaaagttttatcatgtgagtttttaagctaccaacctaccaacctattaatagtcgggactgaatccaccgacactttgggtatctattaatattgtggcatttaatgtaccaatccatttcaacttggttgtgagagaaaaaaatagaaagaataaaagtgatagataaaaaaatagatgttgtttggttatttggttaaataaaaatagagtaaaaaaattaatagattcatttttatctattattattatttattttatttttattattcatattatattagactaaaatataattttcgttccttattttttaaaattcataattttaaatttttcaattttttaattgagacatatttttcatttttttaattgagacattttttctttatatttaaaaaatttacaattttaatttctaggatcaaatttaaattttgattgtgtactttttaaattattttttaataaattaagcaattcaataatgaaataatttaaaaaaaaaacatttgtcaagtgactaataaacagacatgtattaatcaacattaatagaatacatatatcaatatttgaaattgtttataaggattaaaataataaattttaaattaaaaaataattgataaaatatttcaattaaaaaatgtgagaactaaaattgtaaatttaaaaaaataggaagatacaaattatatattttccttatatttattgttagttataattattttaaaaaatattattgttgttgttattatacaataattaaatgggcataacctattatgctttttacataatcggttaactaatgtggaggcatgggaaaggcatgtatgtaggcttgcagcaaggagagaaggagagagaaggattttagtatttctgctgctttcttcccatgtgagaaggggaattttgcattgtgggacttaattagccattaatacttaaggaaattataaaaaacacgtttattcataaaatttaaagactaaattatatgatatgaaaattcaagaactaaagataagattcaaaggaagtatagaaattatatatatatatatatgtatatattataccaaacagatcattaatgtttttttttatcaaatgcctctctttgaatgaaataactctgtcagggggtgcttcttgcccagaaaattcagaaagaaaaaaaaaaactcatagaagtaactcataataaagttaattattttaatagatattttatatattaaatttattacatattttgatattaactcaatgttcacacactaaattttaggcaaaccaaatatttgtaccaagtcttcacagggcagctaacggtacagacgcaaccaatggctattaagtaacaaaagaagccagcgttagattggaaccacctcagccaaatacacaggccaatatgcatgcttctgtccaggctgggcaaggtacacaattcgagtgcattttacgaagaaattctagcagctgcaataatgctatacagtttctgctacgaaactaaggagggtggagccatgtgttgggagttgcatcagaattgtcttttgaaagggtcagtcttgagactgattacaaatctctgtatgatcccagacgaaggagctactttcggttcaagattgtcaaatggttttaaaatgtttattggtagttccacgccagttaaataattttaacacaaaatttactctactggactagaaagtcccacatcgatgttgtaattgtcctctataaaggtttagaaacaatttctttctagtttctaggacggtttcctgtgttttaggccaactgggatatctgcaagttagtatctattttaggcattctgaattttgattaaactgaaatttagcagacatgttctttttgggggtacttgaactatgtttgcagcttggtcccaaaattattacaaatgtggagttggtgcaagtcactactcaagttggtgcttagaaacactcatatgtcacgtccgctatatttccgtaacgcaatttagatacagctttctattagaaaaaacgcaaccttcggttaacattttccttacggaaattcttggcagaaccacaactaataccaaaatgaaaatacaatttactatgcttattgacattccctcagatagtctataccaagttgtaaaaaatgcaatactcttcaaaatactagaaactggtttgatggggtgtgccatgcctgtgcagtattgcaacgcttgggcgacaaatgagagccccaataccaagctactgtagcagaccctcccctcaaaaaataaatttattatcgtgtgaacttatgaccacatatcatatattaaactgataagaacagatactacacttgatcttagccaaaaggccgagaaaggtatgctttgtacaatggaataatgcattttttatagtttagtcttcagcgcttgttatttctcttgagcgatgtggtattttgttacactgtcagtcttcttgtttttgtagtccttataggacagtatttgtttggtcgaccagcaaccatccaagtctaacaaatactacggataatggatgccatcaaccacaattaatgaagttgagatagcttggttcaagcttgttgcttaatgcataatactggtcattttgatagatgagtttgaatgaaaagggacaacatcatcacaacatattgagtcttgagactgtgcatagtagacaggaacaaagccacttcggcaaagaccagaaatttatctctcaattgtgacagggtctgtaaaataaattatagttgctttgaatcttcaaagttttctagagaaaaatctttggaccgtctgaatccagatttactaactaataaatggaacctcatgtacgactacattttgaaagaattgtgctggacaataatattctctaaaaatccattaacttcattgagcatgcagctataatactcatacttatagtgctatcttgttggatgtttgtcaatttttatcgaattggggtgttggtattcattttatcttttggaaagcgaattataatgctgagctggaatttggaaggtgctgagctgagtcatgtttgcaaaaattttgaacattgcaaaataaaatcacagaataagataaacattcaaggatagagaatctcttctttttttttttttttttgctgtttgttagaaggattacgttatactataaaataataagagatgcttcagtgtatgaatgaatcaatcagttcacttatttaatctcatacactgaggatcaaaatgtagagggccagggaagagaaggaaaccgccgagagaagtatcttgtcattcttcatttgaggatagataaatttgtgaaattgacaagatggtagttagggcacaaggaactctattccatcttgtatctgagccaatcaagttactgtatgctcagaaacttctggtaacaccacgccaaacatcaaaacaaggtgctcattcttcactggtttccaaatattcaatgtttagacatgaatttcatgaatgtttttttccttaaaattcaaaagatttcttcgttcacaccccagcacctatgagtacgggtaattttggcatgagtcttagtgaaaagggatagcatcacaacatattaagacttgggtttaaattgagttacactagttcttttaacctcaaatttggaagttaaacttggtctggtgatacaaaattgtaggagaaaatcatggtttaaaagcccactccaactggtatttttgccacttagttccttgggatctctattaggccacaattagcaactagcttacccaatttaagcatttgagcattctgagtttaattaaactgaatttttgttgtctttttggggtacttgaactgtgtttgcacttagcaggttggtcccaaaaatatgacaaacgtgaagttggtgcaagctagttctcgagatgaggatgcttgggctatccttttaagactaaggtttcaatagaagaaccatttttttgcccaagcaaatcagagtatgaactattgaacttagttccatatatttactaacataatctatgactcatcaacggagctttatgctagtatagaaatggtcatatgctctgtatatttacagattatgacttacctgagaactcattaggagagaaaactttaacaagcaaaactaggtgagatcacataaagattcaataatcatggtttactttgaaactttgctccaccaaactatggttgagaccccagaaattatatcacttctaccttttaaggaacgaaataatctatattatcattttgcatatcatcctcacatttatggggtcgtcgacacacctggtaaaagttttagtgaggattatttgcctgttttgattcaacttggattcatttacttggtgcctcttcatgttctagggctctgctctgcgtctgcggttgtaactatggattcggcttcaaagctgcgctcagaagagaataacattagtctcaaggatatgtttaaaagatccattgacatatcaataatgaaaggcacatttataacttctttgtatatgctcttttggttatcttgtctcttgattgcattcccatggacagtaaataactgttatattttcttcaggggttttggtttctacatattatttgcggtaatttgctatgtagcacttgcaaagctattgatggtatatttggaatggagtgctatctggaatatgagttttgtgatatcagttgtggatggtatatatcgtattggggctttgcgagtttcgtattacctcagcagtggtaatcagaagagaggactacttttgatgcttgttttctttgctttgggactttgtttaaggttgtcatgtgtctcccttggatgctataaaggagggtacgggatatttgttcaaattgggctcctcactgtgttaaatacactgaaatgggtgtcgtgcatgatttacttttctgattgcaaggagaggaaaatggagaagaaagttgatgaggaatcaggaaaagatcttgcaaaatgattcatggaagaatggaacttggagatattttgctggaaaatactgatgaatttgtttttatgtagagttagtgatgataatttgaataatgtacaagatgtgtaaaatgggaaatctttatacttccatgtgccataaacaatgtacgactatttatctgaattattgatcaggaaaatattgagaacaattactttcgtcaaataaaaacatgaaaattctatttctatttttgagtagagatgaaggaactggtggcctagttaagcaataaaaacagaatgagctaggaatgtttggctagaaaatttgtttggagactggtaaagaatggggcactttgttttgatattaagcatcgtgttaccatatgtttctgagcgtagagtagcttaattggctcagatacaagaaagtgtggaattccacgtgctgccataactaccatcttgttaatattacaatttatttctcttctcaactaaagaatggcaaaattcttcttttggaatgaggttttttgcatcacttacaagttacaactcattttgctggcaaaagatctacagagtaatgtcataaaagtttgactctttccatggttcattgggaatcactcggtacacaagacatcccatcctgccttctcacatgctccagacctcatgaaaattttgtcaattgttttagaatcaatcactctagcaaaaagattgcaaatagttataaacaaaactcgaaacttaacctcaactgatttacttcttattaatatgtgtagtgagattaacagaagcaatcaattatataacagaatggttccagtttacaaccaaaacttttacttcctcccttctacttactcatatgttggcactagtaaatgggaaacaggactaacctttaatgtgacccatacaaattttatttaatagaagaaattttttgagaaagtggctgttagatatataggctatccttttgatgcataagtaagaaaggagattggaagatatgactttatatagaatatctaaatctcttattactataccgatcttagtcggtttaaacaattgaacaataatacaaatatgcattatatttataaaaaaaacaagttttgctaaaaaaaagtaaaatatatttctcagttttttatgattttatttataaacttaacgtatacatttttaaattttgttttaatatgtacataatttcagatcatctctgatttaactcaaatttaaaacattaatccaccctttccactgttttttttctttaaaaaaaacaaaattagctgtgtatgaaagagtgattagtggcagagaaatggcaacaaaaattggtaaaagaaaagagattagaaggtgtgaagaaataggtaggagaatgagaatgcacagccacacaaaccagaatagaaagagtgatgactcactaaagtgatggatgtggtgaagaacggctagcggtgtgggacttcacatggcttcttctacactcgccctcactctcagcctctccgccaccacctcctactcctatcttcccaacaccaaacaccggttttcatgtcccagaataaagttattctccttcaagcaccgctccttctccgtctcagcttctgcttccacttcaaattcgcttcaggctctcatattcgactgcgacggcgtgatcctcgagtctgagcacctgcatcgccaagcctacaacgatgccttcgttcacttcaacgttcgctgcccctcttcttcttctccgggcccactcaactgggacgttcaattctacgacgaactccagaacctcattggtggaggcaaacccaaaatgcgatggttctctgttttgttcttttgtttatctttatgttctgctgttggagtttacttacttatcgtgtgattgtgttcgtttaaggtactttaaggaacacgggtggcctacgtccacgttgttcgagacgcctcccattaatgatgaggatcgggccaagttgattaacactcttcaggtatttatgtctttcttacctttttcctttgtctgtctttagcactcagagtaagttagtgtatatatattgcattagcttccgtacatttttttaatccataaatgttaattgttagtttttattagttgggatttgaacgcatgatctcttccgcccccttctccctttaccactaagccaatcttagaacccacattgcttcattacgtggttattagtttaggtgcttcgtaattcagttattaagtttctcataatatgaatgtcactcagtcttctgaacttggctctagcccttgttactttttagaatttaattagaatggattaacaatatagaagctttttagactgacatccaatcataagcttttgaacatggaattttaccccatcctagtgtggaaaaatggagttaacgagttcgttgccattatttctttttttcttttctttttggctattccatttgcatatagaagattcccaaagtatgagaactagagatgtttatttccttccttcgttaatgaaaaagagaactagcaaaaccatgctcatgagaattgcttcttattccttttcaactattttgagagggcaaatcaaatttatgcatgcatgaatgtcatattttgatgtttaaccattgaagaccctttcaattgtcatttcatttggaatatgatgtcattgcattttcctggtattgatcatgtaggattggaagactgagagatacaaagaaataatcaagtcaggaactgtgagtggactcctatactgtgaaattggtatctgaattgttggtatgctactgttaaatactcatacattttggcacaggtaaaacccagacctggagttctgagattgatggatgaggccagagatgcagtaagataatgatatatatgttctagcactgcactgatctctagtttcagtttcattacctaatgtattacttgctttgcttctgatgggatgtcttcaatctgagctgtttcggttattgttataactcatattttatgttagttagggattatcttttaagtttgtcattttttgccaaattgttgttgcaggggaaaaagctagctgtttgctccgcagcgactaaaagttcagttattctctgtcttgaaaaccttataggaattgtaagcccattgtcactattgggagtagaaattatttattaatttgcactcaacccagttattttctctgttgtaggagcgctttcaaggccttgattgcttccttgctggtatatatccttttattggtcatataacattcgagacatatgtttcctgctcaagtattgtgaaacaaaacttacaccatgctgcagcgccctctgaagcatcaaaactcaaaattaattttcatctatgtttattttttcatcctataagaaaattggataacacattctcataacattagttctattatacatgtgtagaaaaggttttccacttttcctagttgttaacatccaccactcagcttgcaaattttattgatatttttatgtggcagtactttgggtatttgagtttaaatctgtctgtccatttatttttgttttttatcgataaatgttagttgttagttttgttagtgggagggatttgaacccacaacctcccccctcccttctcgcttcaaccaccaagtcaatcttataactcctcatctgttcatttacttaaacttccaggtgatgatgtgaaggaaaagaagcctgacccatcaatatacgtgacagcttccaaggttttattatgacaatatgatcaaaaactttgaaacatgaagttttaaatttattttatgcactaaccgagtgagcataatttacatgagcattgcagaagctaggtatatcagagaaagactgcttggttgtagaggatagtgttattggattgcaggtagattttctcgtgttttcaattttctatattttgagatataaccaatctaattatatggtatatgctgtttaagaagagaagaaaacggactagatgagcttgggttagaaagtctaagggcaaggagttgtctttgtgtattattagacataacaatatcaatagatgagcctagacatatggaatttcaattacagaatcttcattttgttccttaattcaccaaattgcatttaatcttgttatttaactaacaaaaatgctgaaactatcatctgatctaaattaacctctataggcagcaacacaagcagggatgtcatgcgtggttacctacacaccttccacagcagaacaggtgaggcagttaagttaactttcaaacaaattcaacaagaatctgcagattaatttgatattgaacatggaggggaattactatccacttaaactggctgcacgatgatgtacctgtattatattttggatctaatgtaggatttcaaagaagccatagcaatctaccctgacttgagtaacgtaaggtataaggcatagctaacaactgaaggtattagattttcttcatttagactcagctactaaaattttgtgaaccatcatgcagattgaaagatttggaattactacttcaagatgtagtagctgctaaatagaagatttccttgtgccttggaaatgttgctattttagctgccctgcagtggtttctatcaggaaaatggattgaaatatttgatgtttacgacaaggttaagatctctctttaaaaaaaaaaacattttttccatatattaattgacagcggatgatgtatacgtgcaaatcaaaatgtgacaacaattctttgcaagatatattaaagaccataatctattgtttgtgtttttctcattaaattgtaatgcttgccagatatttcctttgacaattcatcatgttcaatgcaagaaaattgtgatattttagttaggataagtttgctttcgccataaaaataagaaaggaaggaaaaatcagcaaagaacttaatatgaatgttcaccctcaaatttaatgggttccgaatgtaagtgtctttcggactctcaagtctcaatcgtctaataacaaaacacaagaatgacatcaacggttcttctgattctattcatgtctccttttgtgatatacgttcgtatttttttaggtagttagggattaatttgtcatcgttaatggaaggactgatatgctgaatgctagtagcattgcaatggaaaggttgtttgaagtttgaggagtctacatgtttgcaaaggaaaaaaaaaagttattttattcagaatatgtatttaaaacagtcgtaatagtttattatatttccttgttttctaaataataaatcaattctcccaaaattttaaacatataaacagtttgaaaaaagtgagatgagagaggctcgagaactaacctcaagataactcagtagctatgaaacctaagctagccaactgtaccaccacccctttttatagaagtgagcttaattatagttaacctttagtaattttcacaattaaccgtataagtgccacatatcaaaattatactatgatatataatatatatatatatatatattttttttttttaaagtgtcatgtaattttgtttatcggacaattgcaattgtgcacagtttcatttttttagtattttcaacacagagacagttgtatttcattttgatgcattctttaaaaaaaaatatcgatcactaaaatagattagactcttatggcatccttatttaagattgtatttttgttcttttcatttttcttctctttgtgtaaaaaaaaaaaaaaactcttcattataattgtcagttttaaatttttgaaaattataaaaaaaaatcattttttttcaatttttagcttcaatttttgtggttttaaaattgatgatagaggtaatgatggaagcaaaacaaaagaggaggagaacttaataacactaatgatagatttgtgacaataatatgataatatgacatgataactgtaatggtaacaataatcataatattaacagataatgatggtgattagaatgatgatggttattgtgtagtgctaatgacggtggtaattatgactagaatgattgtgacttattaaagattattgatgataattgtctttaatcacaacactagaacttcttcatctaaaatctagatagttaattattaggtttttataatttaaaattctaaatagggtaagaaaataaacatcacatagtaatcaaagaataatgcaaacttttctaaattttgtttcttacaaacatatttttacttttgaatttaatggtcatgtaataataatctaaatgtcattcaatcacaattctcatcttattcatgataagtttattaatttttataataaatactttataaaaaatattaacaataattttttttattaaatgaaagttttactttcaatatataagaccattagattctttatttgataggggaaaaaactaaacattttagttttaggataagagaaaataacaaggagaaaacagttatagttggaaggacttctaatatgtgcgctgaagtatttaccccaacaaaatagtattatttactgtaattttcatttttaaacatactctcccaatgaacaacacaacatctaggctaattactaactaaacacattagtaataagatgaggtggtggcgcagttggctagcgcgtaggtctcacagcttttgagttatacagggaataatgaccaaagtgccacatttaaaaaaaaaatttcagaatgccgtggatgttataaaatttgccaatatgtcacaccacctaattccttagtcacataaacgaagtctacggttgacgtggcgttcaattattggaagatttatttcgctacatagagtagcgaattatgtatgacacgtgacaaaaaattcaaaattgcgtataaacttcgaacgaccataacttttgactgtaacgttcgattgagatgaaatcgatggtcaaacacttgaaatttataggagaagccctgggcaaatttcgagtgtttggccaccaatttcgagcatttgaccaccgattttgcctcaatcggacgttcaagtcaaaagttataaccgttcgaaatttatacgcaattttgaattttttaccacgtgtcatatataattcgttactctgtgtagcgaaatttgttcttccaataattcaacgccacatcagctcatgaacttcgcttatgtggccagcgaattaggtgacatgacattttaataaattttatgacattcatggcattttgagatttcttttttaaatgtagcactttggccactatttccaacttccacacatgcatccctgcaattatagcaatgaaggattacgtgtgtcggggtgtacaactaaaactttcaccataaaaattatattaaacactgaaatttcatcaaaacaaattggtaattattattttaatatttattttttttctacaaaataacaataataattttcaataacctattttttttctaaaaccatactttttcctacaaagtagcaaaatcacaacattaaatttgtactaaatttaatttttgtacaactatattttttctacaaacttaaaaagtgccaacattaattttgtattctttttttctaaaactatttcccccctaacaaactaacatgacaacaatatttttctataacatattttttctaaagctatatttatttttctacaaagtagaaacatcacaacattaaatttaatttttatacaactatattttttctacaaagtaaaaaattgccaacaataattttctattaattttttttctacaaactaaaaaaatgccaacaataattttctattgaatttgtacatattttttctacaactatattttttttgcaaagtagaaaaatcacaacattaaatttgtattaaatttaatttttatacaactatattttattttctacaaataaaaaaacgccaacaataatttttctacaaagtaacaaaatggaaacaaatattttctattatattttaaaatacaaactaagaaaatgtcaatatatattttctattatcttcttttttttcattttttttgcaaactcaaaatatgtaaaaaaatatcttctactatcattttctaaaaacaattaaaaactgcatcatactaaaacatggaaacaaatatttcctacatcattttttattctgcaaactaaaaaataacaaaatatttcctattatgttctcctactgacatacgaactaaaaaattaataacacaaaataacacaaacaaatgaagaagacttaaaaaaatagtaaaataaataaaaccaaatcatctttatacaaaataaataagaggacttacctgaccaccaaaacttatgttcaaaacattattcctaaagcatcttttacgctatatatcatcactcctttaaagattcaaattctactctgcattcccttcctatgtgaaatacagtacattatccttccttaacaattgaaaatatattacattttattatacacacatacatatatatatatacacacaattttaattattattattatttaaaaataactcatcaaatttattttattaatttaaatattttattcaattgcatatattttattattataataacaatttaactcctaattctacctttaattattatgctagaaaatattatatttttcataaacttcattatatatttaaaaataaattttaaaattttattttcataaaatgtattctaaaataataaaattacaaataatatatatgcatatatatacatgtattagtaaaataaaattaaataaaagtaataagatagctttcaattgagtttattaatatagtattttttataaatatttaaatacatcggtagcgtcctatatagtataaattagtatatttattgagtataatatataattaatttaataatattactatatattatttttgttacatataatatatttattgaatttaataaatataatattaatatatgtatattaaaatataaattttaaaaataaatttatttgtattaaaaatatattatgaaataaaatataattatcataatatttagttatgaattatatatatatatatatatattactctattttaaaataattagaaaccatttctaaaactgattttggattaaaaatactttttaataccgattttaggccaaattcaacgttatcctcacataatccgtgaaaggcaattaccaatgttatcctcgtagtttttaaatagacagttaatccgggcttgggcccaggcccatatgtccgaggaaaaaagcaaaaaaacgtgggtgatgtctttatataagcatcacacagagtcgtattcgatcaacagttagtttctcggttctaaaacgatttcaggtttcgtcaatgggttctgtataattcgatgaaactcgaatcgttgaatacagggagagaggtaatagaaaccagtgttatcttcttgatttgaaatcgatgaatgtagagttcaatttggcataacttgcgatatgaagcagtctcaattgtcggaatttgatttcttgtgatctttcagggccctcatcactgcaatgtctctctctaggttttcaaatttttaatgcgtttctttctcttttcttgttaaattctttttattatttgacgaaaccggtgtctttcgtcgtgcaaacgcattctgtctcaaagctatgattagtgttttgagggaaagccttcgtttgctacagaattagggtttataagccctataaaggtgaccatgttgcagatttttacctattgggttatacatttttggggtttctttaaaccgcgatttttggattttggaatttctgttgaagatttttacctatttggttatacaccgcgattttttttggattttggaatttttgttgcagttttttttacctatttggggagacatttagctcatttggaaacatatcttggcggcattaaatatatgacggggttacctgatattgtaataatcgtcgatcaacaagaagaatatacggctcttcgctattggggtttctttaaaccgcgatttttggattttggaatttctgttgcagatttttacctattgggtcatacatttttttgtttattcaagaaagcccaatcttgttgcccatgtccctgaaaatggaaaagttcagttgctgctatgagatgaattctttattcatcatttgcaaatttgggtatttaaaccctataagattgaccctgaccctgtaatcggaaaattgtggttgcctctatgagatgaattctctattcatcatctacaaaattttggtatataagattgatcttgatcctgtaatcggaaagtgtggttgtctctatgagatgaattctctattcatcatctgcataatttcggtatataagattgatcctgactctgtaatcggaaagtgcggttgcctatatgagatgaattctttattcatcatttgcaaaatttgggtttttaaactctataaaaatgaccctgaccctgtaatcggaaaattatggttgcgtctatgagatattctctattcatcatttgcaaaattttggtatataagattgatcctgaccttgtaatcggaaagtgtggttgcctctatgagatgaattctctattcatcatctgcaaaattttggtatataagattgatcctgaccctgtaatcggaaaagtgtggttgcctatatgagatgaattctttattcatcatttgcaaaatttgggtttttaaactctataagaatgaccctgaccctgtatttggaaaattatagttgcctctatgagatattctctattcgtcatctgcaaaatttaatcggaaagtgtggttgcctctatcagatgaattctctattcatcatctgcaaaattttggtatataagattgatcctgaccctgtaattggaaaagtgtggttgcctctatgagatgaaatctttattcatggtttgcataatttcggtatgtaagaatgatcctgaccctgtaatcggaaagtttggttgtctctatgaaatgaattctttattcatcatctgccaacttttggtatctaaaaatgaccctctgactttgaaatcagaaagtgtggtagcatctatgagatgattatttattcattgtctgcaaaattttgatatctaagaatgaccctctgactctgaaatcggaaagtgcggtagcctctatgagtgtggtaccctctatgagaagaattccttaatggaaaagtgtggtagcctctgactcatgaccaatagggtatataaaccctataaggttgaccctgaccatgaaaacaaagaagtacgttttgcccctatgtggtggattctttacccatcatatgcaaaattagggtttataaaccctataagattgaccctgagaatgaaacgtgtggttgccactatgaggtgaattctttattcttcatctgaaaaattaaggtacctagaagattcaccctgaccctgaccctaaaaacaaaaaagtgtggttgcttctatgagatggattctataatgaagaccttgaccttgaaattggaaaagtgcagttttccctaggtgatggattctttattcatcatttaaagagatgttaatttttagccataatgaccctaataaatcaagttgtatgtttaaaatctttgttgaatgattttaaatcaagctgcacgtttaaatgtatatgaacctataaggatgaccctgactcgaattggaaaagtactgttgcttctatgagatggcttctttattcatttgaaaattcatggtatacaacaaccctataaggatgaccccggccattaaaacggaaaagtgcagctgtccctatgagaaggattctctattcttcatttaaagagatgttaatcttgagctttaatgaccctacaacaagttgaatgtatctttggtccaagattttaaatctggacggaatgattttgtaaccctaatgaaagctacaatagtattcatgatggaaaacctggatgctggatggtaggccatgaacaaattttaaatatgaattaaaaatcattttgtaaaaattcagtaggcgtggtgcaccgtagatgggattattgaagtgcagcctggaatttgtaatcatggtgtaaaatttgggtttgattttttttattcatggtgtaaatgatggtatatgcgcagacttctgcatttttttaccacaagtattctgttaaccaaaattaaaatgttacaatggcaactgagaaataactaataagttgaactgcataatgaaaaccaagtcaaatcttgttatgctgttgccaaagtcactgcataatgaaataacaatgaattgtaaattacaccgttttgggtagaaatataaagttctcgagtgttttgtttggacatggttggttacaagtggttttaacagttttacctggtaccccaagtttgtgttaactgagaatttggtgcatcttcgtgaaagtattttcattgtatttgttatgatggactctcgaaataattattacttgaataactagaagtggcaaaggtacgagacatagtgcacatttgataaacttggttcattggaacttcaaaataaattgtatccaggacctttcacttttattatactggttcttggaagtgtatattcttcgagtttgatataaactccttccttgaaatgccagaactgtgggatatctgataacctggtttatgtgaaatgctagattatgttgcttcttctaataaaaaattgtcctcaaacttgtattcttcgtgtatgaatgttgcatgttcatgctgctgcttgctgctgtcctaattttgcacttcagtcgggcatttgaagttctggggtgctttagtagtactattatgatttgtccattaaaaaatgtctgtcataccaaattctaatggcactaccattttcaacaagccttcctttttctttatgcttttattaggaaatctattgatccaggcttttccaacatgaatacctattcctactcttttttttgcatttagaaaaattaagtttgggaagaaaactcccttacactccttagccaattgtggtttttatttagtctccatggttggatggttgcaattttatgttttttgcaatgcattctatgtttcaagtgatcctttctctagccatactttgtcctttaatcaaaggtactttcttggcaagttttaacactgcatgttaagaatttcttggcaaggtcttggtggaagggagaagccaaggatagatggaagtggtttgtataatgttcgatctgcttatatatatatatatatatatatatatatatatatatatatatatatatgagatctgtcagcgttgtgaatcttgaaggggggtggaagttcttgtggcataagctagtacctttaaatgtgattattcttatttggactgtggtgcaggatcgtattccagtaaaaataatctgtatcacagagggattttgagggttgaggaatgtttttgtgtggggtgtagggaagaggggaaaaccattgagcatttattctataactgctctttcttttctcaggtgtggtcgattgtttgtgctggctaagagttatatctataaatcataatcaggtatggatgcatttttttaattttgatggcttactcagcgtttgggaatcaggaaacatgaaggtcaagtaatttggttttctgtgatgtggggaatttggaagactagaaatgatgtcttggtgttggttgaaggctaggaagaaacgttatatttatcctctggttaactggttgtctgatccgttatcatgccttggatcaaacaaggtgtggttagtcgggcagagatttggctatgaagtctggtgtggtgttgatgtgaccaattgtgcagtagttttgaccaatttatttactactttgtatttggggtgatgggcaagggatccgggtggatatataggtattttgggaggtggcctctggaaaaaattcaaaggtgcataaattgtttgtgcgttaatgactcagaaaaaattgtttccttaagctggttgcagagaagttatatgctttttgttggattgggtgaaggaatgtttttttaatggtgaaataatggtcttccttaatgtggagcatcactgcagaatgtggagaccaggttatcagttcttggaagagaatattatgtggctttgaagtctttaggctttcccccctttgttgctttgttttgagtactattctcatttgcatttgcatcataaaactgtactattgtggaaatcatttattgcataccttgtgctttaaactggtattgaataatattctttatataatttagtcattaatggcaaatagtgaaacatggtggaaggccaaaatttcccatataaacacgccattgcgctgccatgtcaggcttcccttcataaatttcctgaggtggttggcaaaaaatctgccacgccattctgccatgcactgccatggccagtatttaacattgacattcacagcagcatcatgttgaacagtaaaaaagaccattcatctttaattgttgtgacatttaaacatgattttcttgtgatagtttcctttccttgcttcctggcttgttttattgttctctgtttaacttcaatatacttatttactttataagtagcactgccattgaatctttcatagtggctatatttaaaagccaactgcttctttcttatatggaaaatcttatcttcaaatttattatgtttactggaagttatttttcattcttaagggaggattttcgtaaagaatttcaagagcagaattcagatgtaaagtcaaggcgtgatgtatgtgtagaatccattctattagtatttcttctaatttattttatacttttaattgctcaagaagaaggattgttgcacaactaattatttacaaattataaatttcttatgagccaatacaaacttaagcatcaatttttaaaatttgcctgttgttttaagagttagtgagaagtttttatacttctcttttgtgaaactagcagctctattattatcatttgcaaagtaatataattttttgttttgttttattccgccctttgttcattcagattggtagtgcatctggaaagaagtggatatcaatgactaatgaggttagttttcttttgtagcctttccttttttattattgactttgaattgcgttattatgattgtgatgcctgaaaactgagtaaattaaatgtgaggaagaagaacatttttgttatatttgaagcagttggaattaattgtaactacttttttattaagaggctgagatactaataatggtaactgatatatttactgatatagaggtgctcatccatttatttcccattttcttcccttttttattttgttttttaaatttgaaatatcataaatactcaagtatataaaaaatatctgtaagtatttttcaaacagatatccaacgaatattaaacggataacaaatactaaatttctctaacagagacaagtaaaaaataactcctattcatgtctgatcctaccattaccatttgtatttccgcgtctttcaagttacttcctttcattttctctgtatctttcattctcccatttcctgtttcacatttcatttttttaatttttttttgtcgattaggagcaaaatttcttcatcttttgtaaaagggttattataatgtggggcaatcatgtcccatcgtgcattctcagatgcttcattgggaggtactttcggctcgttaatattaatgtattctgttaaggcaatgacaaactctttcctcgagactaaattaatatattgtattctttttgaattttcctagctcgtccctaatattcctcactgatttctacagcacgcccataaagcccgtttctttcatgttataaaagaataaaaattgttttatccttctattttttaaaatttatgattttagattacttattttttaattgaattattttgtcttttacatttgaaaattttgtgattttaatcttcttattttttaattaaaacatttcatttatcatttttaaaaaattcaaacttattaactgtatacttttttaataaactaaacatgttaatgattaaataatttaaaaaaatatttatcatgtgaacaacatttacataatataaatatcaacatttaaaattgataaaaaaaattaaattttttaaaaagggtgagaatattttaattaaaaaataagaaactaaaatcataaacctttttaaaataaaaaaggaaatgtctgaatttttaaaaaaaaaaactaaaaacacaaattaaaaaaaaatgaaaacatagattacatttgaacctttataaaaaggtatgaagtatgaagaaattgcaattgtgtgactctatctaactcaattgttgctttctcaaacatcccaagaatcacagcttggtgactaccatggctaatccatcatcctcgtcctcctcttcctttgccgatcaacgatggtcttatgatgttttcctcagttttcggggcgaagacacacgttttggttttacgggaaacctttaccatgctctatgccaaaagggagtcaacaccttcatggatgatcaagagctgaggatgggagaagaaatcacgccagctctaatgaaggcaattcaagaatccaggattgctatagtgattttttcagaaaaatatgcatcatcaacattttgtttacaagaacttgagaagatcatggagtgcttcaaacacggggggaggttggtttggcctgttttctataaagtggatccatgtgatgtgcgccatcagaaaggaagctatgcagaagcactagccaagcatgaaacaagaatcagtgacaaggacaagcttaaaaaatggaggttagttttgcaagaagctgcatgtctctctggttggcatttcaaacaagggtaagtagatcaccaatcatctcctttatatatatttttatcattataatattcttttaattattttcatcttaatttatattgtttttatccctaatattatgtgatactcatacgacacatgatacctctaatttttttttaaatttctaaaataaatattatttgtctactttaaaatgaatgttgggaatcaaaagtaataatttcatatattgaaggataaaaatcaaagagaaaagctatacttgatgatgctaaaatagtcattttacacataataatgttgaaactcactcattttattagaattaaaaagactaaatatcacctttaattttttattttttaattttttttatgcatttcaaaacttttatcttggtcttttcgaatggctttttttaattatttctttcattttttattatgatcgttagtgttctgtgaatgtgtaaacgctaagatctgaacaaagggaaagcgtcaagatttgaaccttctctgttcgcttctttctctatcaatcccacattccccttcatcttccgaacacctctgcctccaccctccaccggcaggggcggacgtgttgagtagggggaccttggccccagctgacttatttttttaagcattgtaaaattaatagaacttattttttaaaacattgtaaaattaatagaagtcataggttgctttctccttcagtatgacatgtcttgctcgtgtttaatcgtagacttgtgttagagtaaaattgttttccaaatttgttcttctctccttcatatggaggaccccttaaattcttctgagtatatatcacacaacgataaatcaaaaggctaattcatatattttataaacatattaattaatatattctactttatatattgctataaaattagataacttctcatgtgatgggtatgtttctcttcttgatttattgattataagattattgttgagaatcttggttaattgttgttgcaccactcagacaaaagtgtttttttaagtttgaaaaaaaaatagagttaaaatataaagagtctttggtaacaatcttttaaaatgcttccttttttattgtttgaaataaaatcaatttaaattttatgtgtaaaactgtcattatttttgtaaaagtagaataaaatcattatttgaagtttatatgcactatcaattttacattataattttttatggaggcgtattttatgtcaaaatgatcgtaattgagagaagtaattaaaataatataaaattacattaaattaactaattaaataattaaaaaggtagacaattttgaaatttttggatgattgaatcttaaatcgtaattttgagatacttagaggtgttttttggaaaaaaaaatatttgaccaaatctcctttggaaatttgcctaggacttctcctctcaatttcgagcgtttggccagtcaaaagttatggtcgttcaaagtttatacataattttgaattttttgtcacgcatcatatgtaattcgttattatgtgtagtgaaattggtcttccaataattgaatgccacgtcagtccatgggctttgcttacgtggtcaacgaattagttggcatgacattttggcaaattttatgacgtctgtgacattctaagatttttttttttttaatgtggctttgaccactgttccattatcctgaggttgagagttctaggctctctcaccccaatctttttcagtctataatagacttcgtttttgttctttaccctgatcttgttcatggttctcatgagagttgggtctggtcattctgcctcgttttaacaatatggtcgtgggaaaattcgaaggttgtcttcatactttttaatgtattaaaatcataataaaattgggtgaaacatttaatcttttgttcgggtagtgtcagcaaatctattagcctactgttaattatcagatggaaaatggagaaagggacccaaattaaaaatcctaaaaagtatgataaccgaatttgtgcaattaaaataataaaaaccaaaattacatagtgcaactaagaatattgataaattcttttaaaattcagtacttagaagaagaaaaaatgttgaaagtgaaattgacattgctcttcctgtacaggtataaaaggcaaaaggtgtagttctttaaccgtttagattgtgttcggatactcgtttcaccgacgttgaacgtggaaattacacattttattacaaaaacgctgaagcaaccagtagtaaccatttatgatacgattgcaacttacactgatggagtagtaactatttatgatacgattgcaacgttcccccaacaaagaagaaagaggaagggggaaaaaaaaaacgttgccactacggtcaataagacatccctcaatatctgcaactgtcctcaacttccaactgtgcatgtgtggtaacaaggaatatataatctttcgatatatgggattaaataattattatttgctttgttctcagagcatctattgttttggaaataaagatagcattgaacctaaagcatagttcaatatcaccccaccgcaaaataaattacaaaaagagtataagttccaacgaaaaaaaagatctctaagttcttctgctcttcatctcctgtttccaaggacaaataaacaacctccaccaacacaatttaatccctcccagagtacaatagctgttaagctgtcctcagtaaatgtgtaatcaagaatgatgcatctgagaaagaagaatatttgaagtagaaatatttggatagatacacagcttccaacaaaatattatctcctacccgtggcagtcttgcctttgcttaaatcagcaagttcctcaataagctttctctcatcattgctcagtcttttagggatttcaacttgcacacgaaccaattgatcacccctcatattgtctttattcaggaagggaacacctttcttagccataacaagtgttgtgttcggttgtgtcccggcaggaattttcaaatcgactgttccgtctacagtaggaaccttaattgtagtccccaggattgcatcaatatacgaaaccttgcaggtgtataaaatgttggtgtcatcacgtttaaggacaggatctgggataacctcaataactacaaagaggtcaccaggggaaccacctctccttccagcattcccctcattccggaccctcagacgactaccagagtccacaccagctgggaccttcaggcttatccgttttgatttcctcacccgaccatcaccagaacatgtattgcaaggtgttgaaatttctccagtcccattgcatgacgagcatgtcattgactgctggaagatgcctaatggagttcttgttgatgagacaacccggccttgacctccacaagtgctacatctggatggtgtagtccctggtttagcccctgaaccattgcaagttccacagctctctaatcggcttatctctatctctttttctatgccaaaaactgcttctttgaagttcaaaacaagactgtaatactcatcttcaccatcaattgctccattccaagaacctctggaacctgcaccgcgattcatgccctcaaacagtgattcaaacagatcaaatggattgctgaaatcctggcatgacagaaagaaatcattcattgagaaacaagaaaaacaaaataaaattatgcatcaccatcagaggtacttacccccatccccattccagaacctttaagcccagcctctccaaatctgtcatatatggatcgtttctcatcatctgataacacctgcaatggaatttatccgcagaagacaagttattgttaaacatatgcataagggcaaactgagtttaataatctgcagttttacctcatatgcgttactaatttccttaaatttttgttcagctccaggttctctgcaacacaagaaaatgcagacaatagtttaacaataagcaacagttataaaacgattcagattacaccagaaaattatgcaactaacaaaattgtgtttaagacagcttatttttcttaatttcagctgtttttatattttaaaaaaatgtttgaaaatgaagctcaattggaattgcattttttgtaacttaagtcctccctccacccccttgaatttgaacaaacattgtcattttgcttgccagtaaattactatatatgcaaatcacagtaacaaaataagcatcattgtttagtatataatatattacgaaacaataataaacaaagaaaccaattcacagagaaagcattatcaaccaatgttcaaaatatgatgtgaatgaaactcacaagacaagcaacaagcgccataatctgagatagccaaaccatgttggctacagcagtaatgttttttttttttacaaccgggggggtgtggggggtggcgacaagtgaaaggaatgaatcaggaaaaagacaaagtccaatatgtgaaatcaggaaaagaatttaactcacttgttgacatctggatgataattccgggcaagcttccgatatgctgaaatatcaaaagtaaagagctttaatattgctatgacacacacactaggtcactaatcacaataaaagaatatgcacaatcaagcaaataatatgcagattctgatggatgacaatttctcaatcacaattgttcaagtttagctattagatggaaaagagaaaactgagacatagttcactgatacaattgtgatgtgttatataaacaacagcaaaaaccttgaagtcaactatttgatgtgttaataaacatttagagataatgctttatatatatatgcaccttcacacctagagtaaaattattttaatttctcaaaggtcaaaggaagcagaaagagttacaagaaagtaggtaatcattaataatcaacagactaaagttactgagataattattttgcttatatagagatggaggtattatcatgtaacagataaggaaacaaatagaaaataccgctcttaatttcagatttactagcatttcttgaaaccccaaggacagaataataatcctgcattttgacaaataaaggatattcagtgcaatatattgaataattcacatgggctttatacagttgaaataagagacaacaaggcatcctttcacaaagtaaaatcatatatttaaaacacacacacaaaaggaactcatcactgctgaagagtgcattttaaacttacagcatttgctctaacaatcaaccttgatcccttgcgatgattaaaaatttggggcgcacccacactgagcagtgtagaatctcgagaaaaaaagcttgaacttgttgcagccataaagcttaccctgccggtaacaatgcaaaaaaggtgagttaaaagaaattacaaaatccagcacagtgaactaggctgaaaattttgagtatagctgctgtgtaggatgctaaagaatattaacatttgttggaaatagtagattcatgtatcacatgataaactgccatttaatactcatggtattaatgtctacgaagtcacactcaataaatatcacagtagtcaatatcatgctatagcagcgcgaagtagcagaatgaagtggtccttggttgcaacaggattcaaatagcagtactatcacgatatatgcttcaaaaacacttttttttaccctgaaacaacattgtttagcttttggggggataaattgtgatttctctcccattttctatgcattttttgcttcaatggtaggatttgaaacccttcttccttgaccattccacataaaaaaattcctgttttaaccactgttccttcacactttacaggactattttttccgggtgttccattctttcttcttccttaaactttctatttcacattctattaatttttatctaacttgttatttgttttcctattaatttcaccatcatctttcattttttgatgtcattactatgttcttcttgctcctagattgatggtgattgtttgtgtaaactgctactcttattatttatcatgcatttctttaattttgggtttttctttcgtttttgagtacttatatgtatagtataaactatttagtttgtattataatatttaaaataacagccatccccggttttcaaagctagccactatgtgctgctatttgagattgataactatgattgatattaacctagggaaaagtctccaccaagtctattaaaatcctatacgtatggatattttgcataaactatgtaataagaaagcatttcccttcactaaattctctctatattatttttttctcactttctctttcttcctccccctctaaatcgaacaatactcaaagacagataggatggaaagcattctctagattttgagaaattcagaccatatccaaaccataaaattactgtcaatgacaattaaagtaacaaaatcacaaattacacctaacttatgattacatatcactgctgattgatatgatagagaaaacaatgtcaaaacttaaaaagtaatatattcctttcccacagtgcaatacaagtgcatcaacatgaatcatgaaaaggatttttaggggtgcaaacctgtgaaccacagacgtattgctgttacattcaatgagtgcctcataaattgctattaatggcggcacacctatactactaacattctacaaaacaaatattcaatcatagaactcacttgtggctggatggtgcaacctttcctgtgatactggaccctagtaatagctgaggatgaattccccattgtgcagcagatgtactaccaaaaggtgttattgccatctaatatgtaaccttctctgatgaacttctgctagctggaaaaaaaatgtatactgaaatttaatatgctagcatggtaagagaccatcacatcctgggagacttgcacaccatgcggatttgaagacctatgactttattgctacctgtatgtttcatgaattttgagtaatttgtttaattttccagcatttattgtttatactttatagttttaaatatccggtcatcatgccatacactataccgctatagcatttattatggggttgacagacacacgccactatccaggattgacaactatggaacacctattcaaatcctatttcttataatgatctcgaacatggaaatcattttctaaatcaaatgaaacctatttcctaaatattcaaacactgaaaaaatcaattaccaccaaatgcaaaccgatatctaaataaaatcaattaccagataaagttaaacactgaatctaacctctagagtataccaaaaaaaaaaaaaacgtatgagttcggcaagttcaaagaaggaacaagatattaaaaaaaaaaaaaaaaagaatatcaaaccagcaaaaacaaaacactatcgaattgccaagtgaacctaggaatgaattgcaaactattcaactgttcaaatttcatacactagaaaccaataaaacaccgaaaatcacatgccataagaaataaaataaaattccaaacacaagaactacaacaataatgtgcattaaaataaagagtagaaacgataacactgaaatctagcctacgcaacgagaaagtgagtgaaagaatcaaaatatgtaagcgcaacagacaattagcaatgaagagttaatattttggttggagtgaaattggaatagagagagaggaagctggtggtagtcgtggttccctttttattaacctgagtgtgaacacagagagagcgcagtgaaacacaacacagaacactgagttgaagaggatgaggctattgctttgccttgcctcgctccttcgttcgttctctttgatggtggacaccctaatattgcttttctcccttcgcttgttcctcgccgtctgatttattgtggttattaaaattaaaatccatgtaccagccttgcccctaaaggcctaactcatttccttccttgctccattctaattttcctaactataaagactgaaatttaataagcttaacatatttcttttcaattacttttaagttttatcattttatttaattttacaaacttatttaatttcctaaaaagttaatgtaagatccttaaagcaaaaatatcttatcattcatttagatgagaaattacctatatttaaaataaaaaaaaattgtaccgctaattattacataaaccgaccttagctcagttggtagagcggaggactgtagttgataacagatatccttaggtcgctggttcgaatccggcaggtcggagtttttattctaagttacttaatcaataccattaaggcactactaagcattttccaacaatttttccactttcttttaacctttttcatttgttgtgatgcactataacccactaacctgtacgtgattcataaattattttttgcatttaataatttcttcatacagacaatgagtgtaagaagttaagcataaaaaatgaatagaaattaccaatctaatcttatttttttcataaattaccctttggttattaaaatgttattttttttcccgttaaaatcaagtttatttattcatattttatctaatctttaagtcattatatattcacaatggtcttagttattaaaagaaaaaaaattaattacactggctattactcaacttggttcaagtatattttttttaacaactaaattgggttaaattttatatgaacaatctaagagtttgaccgtgattatttgagtggcaatataagtaaaattactttataatatcagcacacaacttattttctcatattctaaatgaattataaataactacatgtcttagtaaaatttactctcttttcaataatttttaaatatattaaatattattaatcaaacaattgaatgtgttaatattaattgaatatacataatcatttatcatacaaattaaacatttgtactatatttacttatttttttaaaacattttattcattaaatttatttttgtgtatactcataatacactaaaaaaaaagtgttatttgagagaaaagttaatgttgaataattcgactaataataaaaatttgatccttaaaaaaataaattcttaatcacagttttcttaaattacaatccaactccaatttcgaattagtgagtatctttttgattgatgaaattttttttatctttattacatgtgcatgtgaagccgagtgtgtagcaagctgggaaattcattaattatttaatccagcactccattcccgaaagagaaagagagcaaggctcaaagcatggcgccaacacctcctcttcctactctcctcctcacccttctctccctattctcctcttctgcatcagccccacccacaaccacagcatgccgcgacacctgcggctcaaccaaggttaagtaccccttcggcacgggccacggttgcggctcccctctgttcagcccctacgtaacctgcggctccaacggcaccggcgagcaactcttcctgaaaagccacaccggctcctacccggtgagctccatctcctacagcacctccaccctcaccctcagcccaccttccatgtccacctgcacctccatgcacccttcatccaccaacttcggcatagactggacctcccccttccaaatcgcctcctccaccttcctcctcctctcctgccaaccccccaccacttccctatcctcacctatctgtgacccttccttcgactacctctgcgcatcactctacacgtgtcctgccgtcgtcgccctcggcctgcctctcttccccccagcaacacctgctgcgtctactcccccgccaacctcgacggcaaaggggagctcgacttgaaagccatgaagtgtggcgcctatgcttctgttgtgtcgctcggggataaccctacggaccccactcactgggtctatggagtggccttgaagtactcttttggtggggctttggataataactatggcactaccaagtgcagtggttgtgagagtagcggcggggtgtgcggctttgcgccgcctgggaatgggtttgtgtgtgtttgtaaaggaggctataacaccagcttggattgctccactactttcaaccagaaccaggactacgtttgggactcttcctctgcgaatcacatcttcttcacctgtacgtcaatttttccttccttttatttacttttgcaaacaatgtcaaaatgttgtctcgctttcttcgtgttcttcatcattcttctcacctttcatatattcctacacgcatacgcaaggaaaatgactgtcactctgagatgggtatagttaatagtcagtgattttcttatataagtatgaaattgtaaggtttaacgagtatttattcctgttattttggtatgaaaatcatcttcttcctacgtacgtacgtacctcttcacacacatacatattaataataataatagtaactaatagtacttgttttgtttggttcaagttcttattgaagataaacaaccatttaatcattttgtaagttcttgaaatcattcgttataatatatattcagtgaagattattcttttctacacttaaatattctcatttgggtgggcggaaacaaagaagaaaaaacgtattaggaaatgtgttttatttgtttatttatttacttatttattttattaattaaaactaaatggtggtgtaagactagtatgacgaaagtaatgaataaaattattcatgtataggcagaaggaataggatgcgaaagtacaacgctttataataatcttctctctagcaaagaaaaaaatatagttatgcatgcctgtatcattaaccatctgttctgtgtgaatgtttagcagcttggcatgtttggagtcctattttggctggttttattttctgcttagtttgatcaggactcaggggagccattcaattgaggcaatcatcaactttttttaattagcaaaagttgctttagaaaagtggatttactcaaaaggaagaataaaggcattccgcatccattcctatatcgtagtctttgtggattcgttttcctctattaaaatagtttatgatcaaagaagcaggggagaataaccctaccttcatccgtagtgtttgtggattttcagtaactagaagaactcaattactttggagtaaaatatgttctactgtgtgtgtgtatatatatatatatatatatatatatcttttgcgacttcatttcattctttactatttttcgctttggtgaacttaccagactcaagcccgaaaaaaggacggaaaaaaatggagaatgtcagagtggttggattgaatgggtaagaatttgcataaagaaaggcaaaggcccaaaggggttctttctttaatctttattaaccctccactttattcgttgtttcttctcccttctcctattaatggttacgtttcctttccttttctctcccttctaaactgccaaataggacagtgactaaattagtcattggcagccagcactgtaatatcaatataatttacttatttatttttccaaaataaaatggaacactaaagcagggagacacaaatagacaaatatatatatatatatatgcacacctgaaaagcatagacatagaagagttgaaatacccacaccagctcatgatatttcatatgcaattcctgtatccttggcaacaaattcctctgaatcagattctatccgtagccgagtttcctgatatatgagtttacagttttcagatgctcatccacatactttaaattggcaacagatacactcttcttttactctataaagaaccagtttcacgattatcccttctcgtcctatccgagaagaaaaataccgcatgcctgataacagcgtataaacaaatatatacacaagcatattcaaaaacaatgccgaaaaataaatctctcccatttctctgctaatccacttagctgccgttactctggtttttttgcacagttggagttggagtagtgggatcaatgaggaaggattttaaattcttgtacatctccttgggcttctctacattgagagcatgccctgcatccttaataaccactagttgcgcgttctctcccaaatgtctaaacatcgggggggaaatgagattttaagttagtaaaacataataaaaatatatgctttatgctttcatgttatactgatatctgaattgccattattccatttggtatctttcccaaaacttcaagacataagcttgctgaaggcattagagatgctttgaagataaaattaataatgcgctaaaattatttgaaattacctttgtagcctatgagctaattccattgggaagaccaggtccttttctccccagattattaacgtaggctgcatcatcgaaaagttgtgccatttgagaagttcagtgaaggattgcaaacatggtgaaattaacacattaatgttaagtcagaagagaataacaaacctgggttatcttaggaagattagatagttttctatccttatgcaatgtttcaattagttctttcctctcttggcggttttcagtacacatcacctgcaagtaaaaccagtttcagtaatgaaatttggtaaattggcaatccgtgcttgtgtattcacgtcaagggatagccaatcacaagtttgaatcctctcttatttttgagtaatcatgtatagttggaattaaagagagaaagacaatttttaacaaatactactaaagagtttcatatcatgcttattagatttgtgtctttttctcaataaaaggactatagaagagagaatccaaatccagcaatcagacaacatacaagcagacacaacttaattttcaagtaaaaggacaactgagaagtagataggaaaatgatgcatggacctccaaatgccattttcagtgtatagacacgacgtaacaaaaagagaataaaatatcagttaatggggtatttgcactgttaggtgtccaaccattattgctgaatagataatctccagtacaaatgtcaaaaatcaaatggaaaatacacttgaaccatccagtgcacagagaattgcccaaaaaaccagttgaaccttccaagcatcaataatgacattgatgacaaaatttagtctgaaaacagcaattgagtgtgtaagggtccgttgcaaaattaacttttaggcaaaaataattttgccaatcgattaggaatacaccacaacatatttaactgcaaatcaaacatgcatatttaactgcaaaccaaacaaaacatgcaatatatatcgcggtgaaacgtttagatcacacgcactagccctgccagttcccaatgttccgattcctactattgttcttttaacttttttccgtttcttcgttgacaatagttttaccctattcagcaccatggtggtaaaatccaagaagacacataaacataaacataaacatatataatcaaccatcatacaattgaatcaggaagaagccgaccaaaaaaatatcaggaaggaaaacagaaattgcgctttttaagcaaaatcacacgaattgtatgaatccaaaacatcaacacatatgagaaacaaaaataaataaaaaaattgaaggcttgaagcatcaaattaacatactcacgttaatgtaatcattgaggaagcaagtgggcatggttttgacgggcttggcaaacgcgagctgcacgagctgtctcaacttttccggcgtctgcggcagcaaaatatccgcagcctcatccacagtcttcacctggaacatcccttcatccaagtctttctcttccaagcacaccccagcgcagcatagcaccaccttctccacgcgctccgggaactgcgccgcgagactgtacgccacgaagccgccgtagcttatacccacaacgctggttctctggagcccatgggcctggaggagggccgcgacgcactgggcctggaaggcctcggagcggtcggggcgggtcgtgtgggagtctccgaagaagaggaggtccgggacgtagacgttgaagcggcgcgtgaggggcgagaggaagtcgttccactgccacattgcgttggccccgaagccgtggatgaggaggaggttgggcttagagtccttgtgggccttgggggcccagcagtgcatgatcgtgccgtcgccgaggtctgttgtcacggatttgaggcccgcgttggagaaggagaagcggaagcagcggtcgcgcgtggcagtgaagctgatgcaccccgccgccatgttgttaaggttaagaggattgggggttgtgtgtgatcaatcgatgattggttgatgatggagtgaagtaaaggagagtcttctgcagactatgagagattctagaggacacagtcacaggacaagtgactatgtaatagagacaagagtcttcagataagatgctttcttactctactcagagaggtaagaattatttttatataattaattactatttttattaaatcaatcaattaaatcattagatcttaaattcatcttgattttacaactatggtcattttattattatcataaataaatcttttttatcatcacattttaacttataacactaacatatatactattcaaatttataacagattaaaattaaaatttaaaaatttattatatattatatatttctacttctattatctattattataaattagatagtaactatggtaaacttggaggaaattttttcggattatataaaaaattatattataacaattttattaatttcttatattattttgaaagtaaaaaaaagattgttttttcttaaaacaatacttacccagcattaataaatttaataattattaaatataattgaaaaataaaaaaatagttttaaaataaactatacttgcatctcctaacatttaacaaatttatatttgatatttcatttttaacatttattttatgtttccaatttatgtaataaaataagagattatgaaaaaaaatttgtgcacctggtagcataaattacatatataaatcacaagagaatatccatagatggccacaatatttactagaatataaaatagcaaaaaaaatatatctattttatcttcctttattaaaaatggatcaaatattcattataatataaaaagacatcactctaactactcactctaactactacgggtgagaaaaggaacccccactgtgtggtatgttgatttgttagagcatctccaatgaaaaatgtttatatgtttatggttcctttacttaaaaaaatcgtttcttgaagaaactttgcactagagattgtcttggtggcataacgatttcttgaagaaaaaaaaagtacatcgtatataagcaccatgttcttaacaaaaaaattactattatccaacatcaaccacccatctaaaaaaagaggaaaaataatgggaaaaagaacaagggcaacaatgttagatcaatgaaccatcttacagtggtggttgcgtgagggaggtctgcaggtgatggtggttgagcaaggaaggggctgtgatggtgctggtgtgttatggtgtgaggggtgattgaaaaacagggaagggggagcgtgaaatggtaagagagaaagaagcaaagaaaatgaaaaaagaagaaaatggaataaagaatgaaaaggaagtttcttggtagccttcttgtaaaaatttggttaaagagcaaatgaaaaaagcattaaggacaaaaataaaacagcaaagggaacattaaaaaaactagtctttattttgatgatcattgtgaacaaaaatcaccgttatagatttcttattataaatttggctcaatgagattaaattttgcacacaatatttatactcctaatttttttcttgttcctatcaagcctcgattttttttattctctctaaaattgatcgcaaccagtataatttgcaatattactctagtcatttgcaaaatcaaacactctctaccagtgaaaattcccaaaatccatcgcaatatgttgtgttgtgaatccaccacctcctcctaccagtgaaaattttcaaaattcatcacaatgtgttttgtattcaccccctcccccacacacaaatgtggtatatgcatccttcatccaatgtaaagccacctacaagtggtagttctcaaaatccataattttgtagtcaaccatcaatccctccaatccaaacacgtgttatatgcattatttatccaatattgagtccccaagcaatgaaattcaatcaccaatcggtgtagacaatattttactagatgagagagcacaaaattctagtgggaaatatactcatacaacattctcagtgacaaaagatgtgattcttgttcaattgtgactcaatgtgttaaatgattcaataataggtgttgactaaacatcaaagtaatattgggcaaagataaaaaaaatgtgtacaacaatgatgatatgtgtcaaagcggacaattttgtgaaagaagtttgattcaattgaaatctcgatggaataagattcacccagttcaaaagtttaacgagtgttacaaataagcagataaatataggagaagtgaaagttcagagaaagatgttataactaatactcatatgatttactcacatgatactgataaaaatttgaggttgagcatgcttggttgttgttgaaagatcaatcaaatttttatcaaattattaaaaaagaataaaggttgccgctggtgaaaattactcgtcatcttctaacctagagacattcattgaagtcgaagaatatgatacgtcatcgccaatgtcttgcccaattagacaaaaaacagcaaaaaggaagagaaaaggaatagaaccttctaacactttcgatttatctgacatagaaagtgaaacgaaggacaaaaatgtgagcacatcaaaacttattaagttaaaggagacacaagaaaggcgtatggagtatgaaattctcatgaaggatacatccaacatgtccgaacagcaacacttagaccacgaaaagtatcgtgaccatattagaaaaaactagaatattaaatgtataattcttatgtacggatgttatgctaatgttgtgtgtgatatttaatcttagcagtgtaggtcgttgttgtatcttaaattcataattctatgttgtaaaactaatcattggaactagccgttatgaaattagttgttataaaactagtcgttatgagtcaagctatgtaaatgtccaatgtttcatcattctcacatattctcatacaaattacaaaatatttatctttgatttcaaacaattcagttaccatataatggatccaaacatcgatttagatgaagttttggatcgaatgatagttgaggaattgaaagacaacatcgataaagaaatcattaggctaataattgagttttggatcaatgtttttacgtaatactttttatttccttcgttatgttttttatttcaatgtcattatgtttaattatctattattatgtaaaaatgtattttttattgttaagcattttttttcaatgttatgtaattttcattatttttaattgatatttaatattttcttcaattattcatatttattatttgtattcataaaaattaaaaaaatgaattaattattttattgaaataatataaatatgtgaatcttttaaaatttcttgttattttttgcattgaagcaaaattttataggaattttttatacgtgatatgattattatgagaccacaagaaagtattgtgagaactaaaaaaaaatgattaaaagactttaaaaaaacccatataatcactctctattaaagatactgttaaggctaatgttggacggtacctacatgttcataggtcgtttgcctaacagagcaaaagatgaagtgttgacttgagatgttgggcatgcaatacctacctcttcatagatcgcttgcctgagcagtgagaagtgagcaataaatgaagtgttgaggtaagacatactgtgaataccaatatttatttgggtgcaatttcatttttgaaaaatgagagaaaaatataatcaaggaaaatatagggaagacttagtcaaaggaaaaagagtgacaaatgttagaaacaattacttagtgagcaaaaggaggttatcaaggataaaatcttggatttggaaaacagaaaattcttaacaaagtgattatgttgttgtcaacaatcacatatatgcaaaaaataggaagaatatctgatggcttggacatcaagttgtgttggcctataaaaagccttcacaatcactcaagaaggggtcagaggaaaaaagggggaaaaaaaaagatcatagggagaaaaaaaaaacttctcacacatctatttttcatacagggattgaaggctcacacttcaacaattatttcaaaattcagaagtttttttctttcacttttctttcttttacatattaaaaaagtgtgtattttatcaaccatgtaatctaccttttgtgtatatctatatatgttgttcggttatttctttatcaagagaattgtattttttttcactgagagtaatgctcttctgtttatactaatttcaatttcctttcacttttaattttcttattattatttgttccatgaatcaattggtaattgtgtgcgctgatggtgctctctatgtagaaagataattttgtgtaggatttttaaaaaaaaaaaacatgagaaagtgattctgatttttaattgggaaagaggaatgataataaaaaaggttgaaaatatatgggtgcctttgtgtgtgttgtgtgcatgactcacggtgttatttgttttttatgcaatgttaatgtacataatatggaaaaagcttagtttttttttttttttttttttttataaaaaaagattatgaattgcacaggcacgtgaacagtgtttttcacgtgaacacatgttttcctagtatcttctgatttttcactttgttaataaaaatagtaaattggaggatttttttttggtagatatagtatagttattaaaagaagggatttctttctatgttattttgtggtttcaaataaaaataataattttaactcatgtaatggttaatgacattaagtgagtagcaattttatctttctttaatgttatttaaatcataaaatttaataaaacaattatttgttatttaaaacatgggcattgtaggatgttaatatcttccctacatataaacagaatctatctttgatttcaaataccactcttaaaaaaggtttttttaataattttttcctcaaaattattccttgcattgtatgtgattccaattgccacacgtacaattaaataaatatattgtgattcccatcctagaattacaaaactcaagattggatgatttcttttcaacacacactccaataaaaaatacatgtatattaggtgaggattatttctcacttataaattatatgtttaaatcttgaaccccctcctcctctcccatgccaaatatgaaccatctcaaacttaaagtttttatacccttaatcttggatttctactaataatagataaacaaataaataagttaatgtcacatgcagtaacactggtcaagtcaatgttattttttttttttgcaaaatactaaatatttttaaagtattactattactattatatacaaaaatccacaaatatcgagtaaagaattgaaaacaggctaaactataaaacactgtaagaaaaaaaaataccttctatgaattgaaatattttacattgtcaactaaataaaaatataatttttaaaaacttttaagatattattataaagattcaataaacttattttatatatataaaaatttatgattaaataaaaatttaaaaagtgcataaactaatttatcttattatgattactatcattatttataattattaaaattattatattattgttattattattctttaaggctcaattaaaattttctttaatagtatacaattttctgtctttttattattcttattattactcttaaaaacattcttattattactaatacttaaaaaatttccctgtttaatttttttacttctcacacactgacgttatttcgttaaattttaattcctcctttaagttcttatttgtatacgttttcatttaattatatatacaacagcccatgaatgtgcccaagttctgttttggggttttgattaaggcttcggataattacaaattaatctgggctcgagtggtcttaatcatacaaaattaggttttgccgcacatggtttattttaggcattttctatatccacttgcattttttctaagtacactcccctttgcctttttcaaaaatcacactctcttttcaaagtttcaaagactaaactgatgttaaaaaaacatactagattttttttatataaacttcaagaacgaaaatggtagtactactattttattcgttaattaaatgtagactagtagcctaataagcatagaattccaaccctgccaaattttgtctgtttgtctgccattcaccaccccacggacgttgattcattgttttgctagtgtaatgcaggtctcagagtgatttgagttgaaggccattgctgttatgaagtcaattcattcacccttccatcttagtcatgcattgtcagtctccttatcatttgaaaaaaaatcatatcttggaataccctttgtcatgctatattttggttctcaaaatcttgtcagcaatcatgtgatatagcatactcttgtcaattgcaaaaattattaagtatttagatcatgagatgtctatatgtttataattttaactaatgatatatatatatatatatatatatatattatattttttaccgatcaattttaattattaatttatcaatttttttgttaatgagaataattcaaacttatcatctgtttttttttcttcaattatcaaatcaacttaaagtatttaatcttttaatttataaaaaatggactaattatatttaagttacatgttatataaagaatataatagtctcagacaacataataataatatttttctatcaattaggcattagagacaaagcagctctcacctacatacatttccgtggctagttaatcaccaaatgtcaaatagaaagacacacacagtttcgattagatgaaccttaaacgagaagacagaacttgtaacaaagcatggccgcaggacccttcttttgtaaaaaatttcaagtagtaattgattattgttcacggacaacgtataaaaagaattcgattttataaaggcatgattccctcacatgaaaacatcatttatctgggagtgtattttggattatacgcaaaccaacatgattaattttaattttataaataattacatttagagcaacgataattggtatgaaagacattctacgaaacccgtcatgaattgcttgatatgatttctgtccaattgtttgtttataattaacgtttgttaattgaagaaaccaacacgatcatgtgccacgtagtctgtaataaaacctgtacagctatgtagcactacgattacatttaaatctaattgcaaatttatattataatttttttgaaagacaatttatagtataatttaagatattgatctaacgatttatagcatctttgggttatttttggaaagcacccaaagcaaaagatacaaatagattcttatttaaaagaatatttagcgattaatacgttgagaatgttaatccaaacatgctataataactgtgatttcttggatccaaattgcaaactagcaatgtaaaggtggttaatttctctcaacattaaagtaactaatctgtaaaattatttcgccaagtggttgtgcaattggccttaaaacaaaatactattctttgaaagaaaaaattgtgagggactgtgttgtgtgtgcacgcacgtgtttttggcggaatattaatgtttttctttatattcacctttgtcaattattcaattatcacgtggtttggtcactttgctgggcaaattattaaaaataatgttttttaataagtattttgaaatttgagttatttcaaaatttgggataattaatcacgtctaaattggtgtgtttttaatactttaacaaaaatattgttattttttaaaaattgaattagggatagatttttaaaataaaaatcaatattatgtaaagaagtgttagaaatcgaattagcgaatgactgaaacaagttcaaattgaatgtgtttaattgtctcaaatttcagaatagttttaaaatagctcaaaatttcaaaatatttattaaaaaaatattatttttaataatttgcccactttgctgaaaataacaattggaacacagcgcatgcaggattgtgcttgtgcatctccctacattgagtggaagaattctcctttggattttcagcacctgatacttttgttaggcagtagtatctttttcttactttattcgactcaattttatcataattcattttatattctctctcatacttttttctttaggcttttcaccttatgtacataaaaaactaagttttacagatatttcaaaagtctatctatacagagacaaactgttttaattatattttaatttgcttttttaatgtataaaacacattttttgtaattatatttttgatatgctagcctactagtccacccatagatggggtagactgcatatttttgcccacgtctttggagtgggtaacccgccccaattggttatgacagactggttcacaaaataaaattgaagtataagaatagtttgtttatataatttggttattaatcattatagctcattgaatacgattactttaaatttgactagcttttaattgttagtacgagttatgactgtctggataagattataaatagtctcttttaagactagaataaatagtttgactaaatcctacacgaaattcattttattccttttcatttgtgattaattcaagcatacttttaatatttatactactaatacagtagtattttctgacaagaacatactactgtcataatctttttaaaatctttaaggtaaaatataccagacacacaaaaatttgattatagtaatttatttatgggtcttgtaaactaatgatatgggtttaaaaaaaatattattgagatgatataagaacattaataaaaattcatgggcaccataattttattattcctaataaaaaaatattttaattttttaataaatgtccaaagacaatagttaatattaattaagaaatttaaaataaaaatattttaattaaaagatgaaaaattacactgctcattatggttgctcgtataaaaacatttgttttttaataatttcttaaccaatctcttagtcgccgttagagcctttatttatttgtatgaaatgaaacgtggggcgaagacatgtcgacattaaatgatgggtgagattttgaaggaaataaaaatccattggaaaggagccagcgagagacagagcagtccaatgggagtgtgagagagagaggcaataattatcgcaacttgcttttcattttcagtcatatttaaatttaaatgcaagcttctctcatcagtgcagggaagagaaacttgtgaggcagatagtcaaatctagtaaaggaagtaggaaaacgcaaaaacgaattactattacaaaagcctattagtattgcatttaactaaccaaagagaaagagaaaggagggatagaaggttcggttccagatttggtgtctctcactctcatccttcttcgtcagtactcagctttccctttctttctttccttttcaccaactgaaccaaccttccttctcttcaccatccctcacctactaccggcttttcccgtacccgattccgattttcagttcagttctttcttttttaattattgttattattattatgattttgtctgttatttcaatcgtgttttttagtgttggtgttcactgttcactgttctgcttctgcccatgccttttgtttttgacccatctttgggcatatatgcattcctttgtccctttgtgcgcgcgatttggtgcctactcgatttgattttctccctcctcttcgcttatttttccggaatcttatttaagtttatggaatttgtcttctcatttttttttcgattagttttgtttggtatggttccgatcacatcagtgttttatgttaagactcttatttatgagtgtgcagtgtagtggatggagtattgtgattttcaattatttctttggttatttttttatttacttccagataaaattagaagttcactgaattggttgtcttgagaatttagactgcttatttcttcacctttggtgattttctgtaatttgtttttttatttttttttattgctaggattagatgaggtgtcagtagttggcaactaatccaaataagtaattgaaaaaacttgcgattgaccttcccttttacagggtggtgagaagagaattgaaaagtgtcaattagctacggtctagattggttgttacattcagagtgattggtttttatagaccgtctttcctttttatggggttagactggggagtgggtgaagcagatagtttagctgcggctgtctatgtctgcacagttagtttttgaagtacgctttgtattgcaataagacttagtgtatgtacagaacagaatgaaacaaaaaggttttgttctttttaccttggaactagacataaaatagaactccatatcttgtgacccacattctaataatggctatgaaaagtactcttcctatttcctcgatcaggcatagcttcatgtttgatcataaaataccttgttctgcaataagattgttttcatcattctaggaatttgttctgcattgtttgtctttgtatggcatttaccacattttttcaattttcacagcttaatggttttgatgattctgtgctgcagagatggaagttgcttgtattttaattggttttcatggacattgtgtcagtggttgatgccagtagaaatggacttcagatttgtgctattgctattgggttgcttatgttcttttgtgttgcctgatacgcaaggtacattcttttgttcttatggcactcaacccattagtaaatcatataagctttgtaaaatttaactgctaaatgcacatacattgattatctttttatgggcataaaacacagcttttcaaactttaatttccaattcatttctgaggaatacatagatacatacaactgtttattaacagaattaaatggatgcctcatattttccaaaactgctagggttttggacttttgctgttggttctagtaggtgtgtaaatgttcttgttcatttcaggagatgcactatttgcattgaagatatcattgaatgcttcagctcaccagcttactgactggaatcaaaatcaagtgaatccttgtacttggtcacgtgtttactgtgactcaaacaacaatgtcatgcaagtgtaagatattttaatattttatgctgttgttttctttaatttatttgatttgctgaagatgttggctgtcattactcattgtagaaagtgttatatttcacatttttaaatcttgattttgtgcttgctgtgtaatatataaattgcttcattgcagatcactagcatatttgggattcacaggatacttgaccccaagaataggagttctaaaatatgttacagctctgtaaggattctatcacaaaaaatccacacaatcttggtcaactccataacactaaaaattatttttgtcattctactcactcaaattttgatgatgggaaagtaaattgatgcatattatacttgtattagttctttgcaaggtaatggaatcactggaaacataccaaaagagttaggaaacctgacaagcttgagcaggttggatttggaaagcaacaaattaactggagaaataccatcttcccttggtaatcttaaaaagcttcaattcttgtaagtatgacattttgtttgctaggttctacatatataatgagtcttaggccttagcatgtattttttgtgcaatgcttaaaagtgtctgtttcttgtcctgctaccagaacattgagtcaaaacaatctcagtgggactattcctgaatcacttgccagtcttccaatcttaatcaatgtgtatgtaaaataatggtttctagaactttgcattttttttaaagtatatttcattaatttagtatctgattgattattcaaacttctcttttgcagtctgctagattcaaataatctgagtggccaaatcccagagcagttatttaaggttcctaaatacaagtatggatggtaaaaccataaaattagtatatgatgcatttaaagcaccaattaaacttgtctctctaaccctgattacaaggacaatgtattcccatgaaacacttaaatagtggtgacatacatccaaagagtccagatatagaatttcatctaacaattactaacttattccaatcaaccggtagtagatgattctaatggtcatttctggttccacacttcgacttctttatttgcatttgaaagattggtggttgtcacatattgtgtctcaacaaacttaatttagttcttgtagcttgactactttccatgtttccaacatctaggaaataggatttattggacacaaactcctttatattatatgattaatgctgttgaatcatgggtgtcggagtggagttgtatattcccattataaatgaagtgtaaaaagaaatgggaagaaataaggaatcagtcaccctaaaagagcttagggttttgcttaaaagcctagaactggtgttacttgtatcttttaacaggctttatcatctgtaaaccttttgatcctgaagcatggaccaagcctttgccaactgatattttctgccacaagttgttttgaaatgaaataaaggggtactgaggattgaactctcaaccgcttgttcaatgtggatccaataccatgttagggaactcaacatcataagtgaaacaaattggagcaataatgataaaaaaaatgcttcattatattgtttggtggtggttaaaatacagagcttttacctttacatttcctctgttatctggcatgaccatatgccatgttgtctatggagtccttggatagaatattatttgaatttaggtgaatgagatatttttcaaactttaacatatattttataccattacatttcactattttaactgtgctccttattgcagtttcactggaaataatttgaattgtggtgcgagttatcatcaaccttgtgaaactgataatgcagatcaaggttacttgatcggaatatttattccatccttttgatttgctgttatctatttcccacttcctcgctacaagctgaatactaattttcctactattggcaggttcatcacataaaccaaaaactggcctcatagttggcattgtgatagggttagttgttatccttttccttggtggtctgctgttcttttggtgcaagggtagacacaagagctacagacgtgaagtttttgtagatgttgcaggtttgagtttcttttttagattgcaatgttattgtattaggtttctcttaagtgaaatgtggatatagacattaatatgactgtagttgtagcatttaaaatattgatttataaactctacctatgcattcttcttcaagtaactttctccttttattgcaaatatgtttttgtcatggttttcccactttttagtgtctttacctcctgtggcctccaggacctaattgctagatgttagggatttaataccaatcttggcgcccctcttatgcatttgaattttggataactggtgcttaaaactaaacattggaataaatctgtgtatctctattactctaaaccttccatttccaatgaatgtgggatataatcaaattttggattgatagaagagaatttactggttgaacgtattctgtaatcttttaattgtgaatgcttgttgaaataatgtaatagctagctacactaaaattgagataaatgtgaacttcctcctttttaaaatagtcattgctaactataaattactattttatcattattcttttttcttgtttcatcaggtgaagttgatcggcgaattgcatttggccaactaagaagatttgcatggagagaactacagatagctacagacaacttcagtgagaaaaatgttttaggacagggaggctttggaaaggtttataaaggtgttctttctgataacacaaaagttgctgtcaaaaggttaactgattatgaaagtcctgggggagatgcagctttccagcgtgaggttgagatgataagtgtagctgtgcataggaacctgttacggctgattgggttttgtactaccccaactgagcgcctcttagtttatccctttatgcaaaacttaagtgtagcctatcgtcttcgaggtaatatgttacaaacttacaatgcattttggcatcgctggtatgctaagtattcaatttgatttgctacaaaatagaaagtattgtttattttgtaaccggaactggatagagattaattggctgaagaaagttttcacatatttaaactacacattttaggatatatgccaacgatttttagtatttatccaacaccttggagcaatgatttgaagaatttttaactagagaagtagataaaagggtattttggtggttgaaccaggcaattcatagatacatttgaacttaattagataaattatataatatatataataatatatacaaaagtgcatatatgtatgcatgtagattatcagctaatggaagcttcaaaatgacaggaaagaataacatcaaagaattagataaccttattttatttttcctctatttatttgtatggttttaaattcaactgaaaatccacaaaccattgagaaaacgttgagaaccaaaaccttatcgtgacttgacttctggtccaaccaagtccaaattttagttttgcagaactggttttgtaaaccaatctagttctctcttttttttgctgcttttcacttgttttgtgaatgccagggtagtttgactgttcaaccttctaatgtatggggtgcttttagtggttcaacctgtcagggtgatctgttcaaaagaaaattcttttgttttaaatcacttgtgaatgttgagtcagaagtgtttcatcaccaacaccgccatcataatatcataagcctaaattaacatggatattaaatgactaacattatagatatgatttttgtatactttgtttaacatgtttgggtaggttggacttccatatcttatttgcatgtaaaatctggcatctttccagtgatgttttactaatactgatgcagaactcaaacctggtgaacctgttctggactggcctacaagaaaacgagtggcgctgggaacagcccgtggcttagaatatcttcatgagcattgcaatccgaagattattcatcgggatgtgaaggcagctaatgtattactagatgaagattttgaagcggttgttggtgattttggcttggcaaagttagtcgatgttcgaaaaactaatgtgacaactcaagttcgtgggacaatgggccacatagctccagaatatttgtccactggaaagtcttcagaaaggactgatgtttttggttatgggattatgcttttggagcttgttacaggtcaacgagcaattgacttttcacgtttagaagaggaagatgatgtgctgttacttgaccatgtaagatctctttctaacatcatagcctctttgtttgattgtgttttttggtctgtttcttgtttgtatagcatgcttagaacttgtgtgtccctcttgggtggtttggtgaatggtgatatcacttttcacttttggtatttcatcacataaaataaggatcagcccgtcatagttgctccacctaaagagtatcctaacccctcttgacaggagcaatggttgcagtgagccaaggaagttcatgtagttataactgtacctctgcatttttattaagctggaaataagttgacgtgtgttgtttatatgataatattgataaagaaaaaggtgaactgcagtgttttatagagttctgcctctgcgttaatggtacttgtgttattattcaaaatccaaaatctaccatttatcggtttatacttttttttttgtttgacgtgatttatcggtttataattattggttactgttttcgcctgtatttttgtgctctacaggttaagaaattagaacgggagaaaagactagatgcaattgttgaccgcaacctaaataaaaattacaacatacaagaggtagaaatgatgatacaagttgcattactctgtacgcaagcaacaccagaggaccgtccaccaatgtccgaggttgtaagaatgctagaaggagaagggttggctgaaaggtgggaggaatggcagcatgtggaggtcaatcggaggcaagaatacgagagattacaaagaagatttgattggggagaagattcggtctataatcaagatgccattgagttgtctggtgggagatgagaggatctataaattattaaattatgagaggatctagaaatgtaattttccttgttttccaactgtaaaaactgtaaaaaagggggaaatagttgtaaaattttgatgttccaacgtgtttttttcttctcttttttgtgtggataaatcaggaatttattttaaaaatctgtttgttgagatttcagctgtgatctgatcccattacggggtacctatcaattagaatttacaacacttgcgacttgtcaaacaatgatttggcactttaaggttggatgctgtctgaatcccaaaatattcctgatgcggtagtagatttttctagtaggtgggcataaaacttttttcagcgtatatttgctaaaactcaaatattaaagtattgctgtatcaggaataataaaacctgggacgctggacaagatgtgcaaagtggtgtaaattttagttggcctttctgaaacagaaactgtgttcttggaatctagttcaaggtcagctaggtaccttagctaaagcaaagaagatggtaaaataattggctccatatcctatatattttaagtgaatctaccatttttctgagtggttttcatttgatttttcttaccatttttcttaatggctcgtgaagacacaaacctagctaccacaattgattaaacctatcttcactcgaattttcacagctgcctaccctgagatgggaatagcaaaatattaagtattctattcacaagatcaggaatcaatctgctgaccattgctaaaaggacccaagccactgactacttgtgtcacaatttgtgggtatcaaaatcattattttgaatacaagaattcaatacttaatgttgccaatgaaagaaagaaaagcctgccattcgtttccatttctcaacagggatatatagctcgtctaaccagtaccagaatattttgggtccccataattggccttgtccctaagtgccattgccatccttgtctcccaataaatatattatacctcaaattattaacattaatgcttctgcctactaggacgtgaaacacctacgcatatcactcatgatcacgcatgatgttacaagtgtttctatcctagttaattccaattcgacattaagtatattgatttttctccaataactaaatacttttgtatgtaaatactgcatattttattctattcataaatctattttctttcctgagttctagtcatgcattttcgtttcctcgtttccccagtcctatctaccttttcttgatgatttgtgaagtgacaaagtattcttcgttgtaatattcttgagttagcaaatcgggtggtggattctgctccgaatctctaagttcccattcttcaatatccatggcaaattggacattacttgcgactgtcatcgtcaaagccttaaagaaatcaacattttcactgcacaacacaacgtacctagaaacaatttgttgttgtttactaagcatatgtagggatgtgatgtgaagtttgtgcacaacaatttataaagatataggtagagcactttgtgccctcaatacatttcacgtggttgtataaaatgcaatcaggtgcggaatattgcttggagatcaagcttcaagtttgattatgctgatgagtcacatgacatatatggataattgaggcaggtagcggtgcaaattaattagctccattcctgacctcaattttacatctcgagactattcttcaaaggtgaatttgacatctgaaggtcgagtttgagggataagtacctatcatgaatgtctcgagagtgtaacactattgccattgggaattatttataatacggaactctgaattaatgtctaaacttattttcgtttgtgtgcgttagtgatatatacactacaagctcacaactatatcgtttcctaaatcagtaacctcgtgttggaaatgggactagtgaggccttatatatgacaatgtttttgaaagcaaaatgatttttaacactcaacaacctttgacaattaaaagagataaaagaaactaaaatataagtattataagtgatgtaatacgatagaaaaaatatctataaataattgatgagtgttaatgaagtagttgaagaaattagatatctcaaaatatttcaaaaacattgttcaattcccaaactacacaagtagattatgagagtaagatataatatgaattgaatgattaaggggaaagagaaggaagaaaagattcacaggttagattttttctactaataaaattaatattttaataattaatatttattaaaaataaattgagttatttagtttgtgaattgaacaatggttttggaatattctattttttcaaacatctaagtaacatttattatttttcttttatttttttattatatcatattcttgattatatatatatacacaataatatatatatatatatatatatttcttttattttccactaggtgtcaattatgattttgcgtgtctaaatactatttttgttatgaattctctcactctatttcgtgcaaaagttacgacagcgttctgtaccttccaaattccaatccgcgtcagcacaccatcatatattagcgcgttctataccctccgtttcgtggccgtcagcacaccatcacatccttttgttaccatcacttttctggcattagtcaacaataatgatgcatcaagactcacgttttatttgacacctaaaatttatatattatatatgatgagtttgaacttattttatgatatagatagagctgttaattcagtcttcaacccataaagtgtcccatataatatttttatgcatctctatcccatataatataataactaggggctagctacccatacactacacttctgaaataaaagaaaaatattcttgaaaactctcttagaagtttacactttgaaagagatcaaaagataaataattgatttaattaatgatatagtgtgataagaagaaagtaataaaaaaataaaaaaataaaaagtgatgataaaatgtttgaaatttataggtatccaaatacaaatattcgaaataaaagggttaaaattggattgaaggtggcatagcctccaaaagcgttaatatatgatttgtttatacttgaaattgttactatgtatattccaatgcaattttaatgaataaaagcaaaaataaaaattctaatccttttatgcaaaaagtccttttacgtaagttattttccatatgattttcaaagatgttcttattcaattttgaaagctgacatgacaccggggtttgagatatggcagcaggggcaacaaaacgcactccaaaatcaagagtgctgcgataacaaatgaaattgttttttttcttttttaatggatttcacatgcattattgatagtgatactggtgtgttgcaggatgaggactaagttcctctgaacaagcaaaatagaaaactggaccattgatgtgtgcctttcggacgctgccatgtttcaaagtttaacatatgtaatatgtaaatataaattgaaatatgtaggatagaacaagtggcgtttatgaagttgtgaataaaacccagactataattaatgtattctgcacctcacatattgttttcataacatattatttatttatatattttctctttgtcactttatataaattagtgatatccacatttttgttatatttatactaattgttgattaaaacttttaaggggagagattaattaaatagttaaaaaattaaatatgagtaagtaaagttagaaagattgaaataacttctaaggtaaaatatgtgaactgataagagtataattaagataaatttctgccttttattcatatgctgcactgaaatatatataattttattatattatttagctcctaaattatctcctaatatatgcaaaagtttcacaaattaattcaaatacatatagaaggttcctatcaattagttcctttcttacaaatttacttgattatgatacagcttatcgaagcctataaataataaattattcaagtaattcatcattagttaatccattccatagttatggagttgtttgtacagaaataaagaagatcttcttaaaaaaaaaaatcgtgtaatgggtgttttaaacatattaagattaagtgttatgttcttattcatttatattattttaagtgtgattaattcatttatttttgaaacaaaacaatattaggtggaccttttaacaaccaatttgaaaaatttatgaaaataacttatgataatttgtccacaaaatacttattagttttctaattatattataagattcgaaaatttaatctcaaaaagtataaaatcttgttgtcttttttgtcaaccatatttaagccattttagatctaatataaatacatcatgtacttaagtatggttatatatattgttgactttcccaataagtaaaatgctaacaatctaatatattctattcaggtgttaaaaattaaaatgaattaaatcttgattcgtcataattaagaccgacttcaagaataaaaaatacttacaaataatctacaaaattctcagtaatgaaattttgaattcacccttgcagatatgaggtgatcagattgttactattttataatttctgaaaaatttaatcaattgtagaaagtatatatgttaattaaaaaggttatgtctttgtgttgcatagttagcgctcatttttaatatttatttaaaagtcatacttcaaatatttgcatgaaattaaactcttgtattaaacgttaataattaaatgtttttcctagtataacataaaaagtgaaagacactaataaattagtttttaacaataagaatttaaatttaatttttaaatatatagaaaattgtcaaattaattgatgtatgacttaatattaaatcgatctttaaaaaatataatttattatcaaattaattcttaaacattataatttaataataaaattatctcctaaatttaacacaaattaatttatcacaaacttaataatttaaaaattaaatttatattttcatttttaagaatcaattaatcacactttgaacgatgaatttgattatttaggttttagattaaattagaaaaagagagttcccatgcatctaaactatttgagggaagcccgaaggccaagcttcctcccgcatgtgaacagttgttttgaatggatccaaatccaaattcatccaaaccatcaaagaacccttcaggtaacccatccaaaccaccctcactttccttcaccgccaccgccaccgccactgggctctcctcttcaagcatcggtgaatgcccctcgaacagcgacacatgtccgaacagcttgtccttcctcgaaaacgtggtcccgcacgagcacttccacgtggcctctccccgacactgcttgacgtggctcctcaagtccgaccgcaccgcgaagctcttcttccgacaccgctggcacgacagcgttttgggacagtggctcctcttgaagtggttcctcagacagaacactgacttcaaaggcctgaacttcttgcgcgtcttgttacggttgcatccctcgaatgggcacgaaaaccgcgcccccttgaggcgcgtctccccacttgccttgttcgcgagtgcctccggggtcttgaactcgtccccgtgcgcgcgcatgtgcattctcagattcgcttcgcgcgtgaagcctttcccgcacacctcgcagaagtgaaggtgcttcgccagcagctccatcgcgtcgagctccaccacgttgtcgttgtcgttgttgttgttgaggttcggagagtccaatgttggagtctccgagagaggaagcacgtttaccgaggcggcgacgagggcggcgccgttggtgataacgtggcgaatggcggttaggatctcgttggagactatgttcatttggtagtgagtgaggagagtgtgggattggatggaatgggagaggaagctttgaagggaatccattcgggtggtaagttgggagaggttgcgaagggaaacatggaaggactcgaagctgttgttgttatggaattcttcagtggtgtttggcatgtggtcgaattagagcgggttattaatcttattctgtatgtatttagctaagttcttcttgttgatttcatgagtaagatgatccagcaaatatatactacttatatatgctatgatatggggtgagcttaataattttaaaataaatattttttatataagtattttttatataagtattttttaaagaaaaattaaacaattcttttttaaacaaaaataatttagataaatacattaaaaataaaaataaatatttattttaacaaataagtttaaaaaaaactgtgaatcgtaattgttgtacaaacttgaaaatataagggaaagttgcttttgtcgatacatgcagcacgtgttgattaccttatgtcaattgacacaaaacaaaacagcaccagtcttgcaacttttttgacttcattttaattactactagtattttattattattagttgttacacgaaaagtcatggtaatgtcattttttttttgtatttttatttaataaattttatgtgagtgtcgttggaaattttgaaggaaaaacatacaggattgcaagatatcagaatcattataaataaaaattatacaacactaagtatttatctcaccccctacattttatcatttattacattttaaactcctgaattgtaaattttattatacaataatcattttttatagataaacattttactctctaatccacgagatttggtcttgaggtgaaatatttggatagtatgtataagattataaattttaatcattgtacaattattgtatactaaaataaatattccactcttgtaactcttttaattcgtatttctttactgtttttgtcatatatatcactttttctatgtatctttttttcttacctcatatctttctctttttcctcagtacaccccataatttagtcttttatttttaaatataaatttttatttttcttttatttgaacataaaacatttaatcctcatatttttcaaaaattataattttagtcccttattttaaattagagacttagtctttcaattttgtaaaattcatgattttaatcttttcatcaaattcaaaatattgagtaataaaaaattaaccaatatggtccaaatttaataaaataacataagattatttgtttatttcacatcataatcaacactaatttctttaccatcaacactttaagtttgacataaacactaaaataatagatattactaatttgggagactaaatgtctccttttaaaataggataatcaaaattgaaaattttaaaaacatgtaaacaaatatctatagtttaaaataaaagaaacaaatttatagatttaaaaaaataaaaagatcaaaatcacatttaactcaaaagaaaacttatgagattgatggatttagtggagcaaaataaggtttaattagctcgtatctgttaggtctcaagttcaaatctctacttatatccttagagtgaagtaaatgtacctcggacaggacaccatccccttagtatcattctccactgtcaagaaaaaaaaaaatcatcccaaaatgggaatggatgtttctgaattttcaattctaatattataaaataacttttttatctctctttttcttatcgtattacttattatattattattttctcttttttatttctttatctctgatatttttggtgtaggaaagaaaataaagtaaattagaaggggaaaaaaagaaaaataaagaaaaagtgtgaaaaatgatttaactttgtaaattgtttagtataaaagatggaaggaaagaaagttaaaatgtgtataaagtgacataaatattcctaagaaaaacgcgaaatatgtaaagatatataagaataacttgatcttttaattatagaagccaaacgatagaaggaaagattgattacattactccatccacttgcttcctctcacttttcatgtcttccatactttaagtgtaaatatgcatgagtatacacaaaatattattcaaatttctgaatcggtacatgtagcaattattccacagacataaatttaacacgtcatatttaaatacaccaaattaaaaagatatacattattaaaaaaagtagttaagattatcattagaaaagtagagatttttttagtgagaattggaaatcttgattcaattatattgtaggagaccaattctttccgcgaaacccaatttctgttggtaaactatatacatagtgctatcgatcatgttgagatacaaatatagatggctcgttacttcattaaaaatttacaatattattttgttcatgacttcatctatatctttttattcatgcttgcaaattacaacgcgatatacagtggtggatccaatttttgtttttcagtgagaacaagaaaatagtctacaacatttatacagaagacaaataatatcaatttttataaagtatataagttgatctttcttcgtgtatgtgtctatacaggcacacgtcaataaatctatgttaaataagtaaaataaatataaaaaataaatttttgcaagttagttttagacttttagtagtagtaacgattttgtattattaaacaattatacagtattctttgttaatcagcttgaactgaattggtccttcttctctccacatgtgtgtgtcaactaattcatttgcaagttagttttgggaattggtagtaggattgattttgtattaataataatttataggaggatactctgataaaaaaaatataagttattcatttataagtttattataaaaaatctacgtgtattacatacagagagagattttttttgtttaaatatatagagagagagaaaatagagtttagttttgatatattgtgttactgtaaagatttttacattattaattaaataattaattacacctcattctaattataacttttaaagtaaatattaaatcaatatttccttgattatataataatttatgactaaataacattaaaaaatgtatattactaatatattctaattaaattttatatgcacacgaatattttttattcgaatttaattaataaaatgttttcataatagaacgtatccttaaaagacaatcgacctttcaattcaatcctattctgccagcgcccgcaaccatatctgaattattaattcttaaccgtgaattctattttttcttttcctgattagttcaattctccagactttaatttgtttttacagtatttttcagactttttgctaatacaagataatataatgtatattttctaaactgtgtaccaaaatatccttcatgccctggaacgcgttaagaattcaagcttggaattcaacatgttctcgtagcacattcatcaataaattctgtgcatcaaatttttcgtagcgcattcgctaatatatatttgtctttctagttggatcttatccatgccatcgcccatcaggaacacacgcggtcttttatgttatatttcgtatagcaaatcattttttcttataatccaaatccaaatccaaatgaataaaaatggagtatatgtttttaatatattttttgtattattgtatgaaatttatatggattctattaagtaaaatgactttagtattttattttaattttaggcttcattgtatatgtatttgatctctcagttatatcataattctaaaattttggttttttaaattctaattgtgcaagtttgatcttccagtcagatgtatcaattaggcgattgtcttcactttgtcactccttcattagcgtcacacgatatgatagtgtatcaatgatatgacaactaaattatagtctgacacactatagtaaatggttattaaattatttatagtaaatttattaaattctataatattatcataaattttgttcattggtaatataattttttttacatcaataatatatataaatattattattaaattaaaacgatttttttgacagagtaaaaataaataatagtacgtagaaatgattactgtcactcctatgttaatttgatgcatgaatcgtgcaatgaaatttcaaatttagaaaaaagtatccaaaccaccatcaaaaaaccaataattgtaaagtggttacattttaaaaagttaatggtaacgtataatttgattaaaattaagcttaagctcgacaatgtgcacccagatttctgcaatattatattatgaacgaaacctcaatgatcaaaatcaagttgaagactctcttactcccttacttcttcgaggagatttggtcataactgacggccaacttttgccttattaggtatgtttcttactcctttacgatgtatttttttcttcatttaaacaaatattaggtgcatgtattcatttacattttttattagtaagaatcaaagaatatcataaagtttcccataattcatacactttattcaatcaattgaattaaactctccatagatagatgtaatccaaaatagaaatgctaaaaacacttgcttttttcttaaataaatattaaatgtccaataaaagtaaattaatggaagtgctgcatgtatgcataatgcatatacaaaggcggatatatttttaagatggaactgttttctttttctttttctaaatgaagatggaactgttaacacttaacacggtagatgagtatattgttggtattttttaatatacttatgtgttagttaagtggcaagtatttttatatatttatatttttaagaatttaattagaatataaaattagcataaaaaattataatcatccattcacaaattattatatatgatatgattgttgagttttaaaaattatacttgaaatgaattttaattgattcacaatgtataaggcatttcattgataaaacatagacaactgatgattaagttataaactcaaactttagatagactcatttaaataaaatattaaataattcatttttttacaaatcaaacctaaactttaaatactcaattcagtttcactcatttacagcttgtgttgagacgtacgaaagctagcaactaaaagctgatcatcagtgaaatgagttgaaagcttttcaattgtgtcgtttggatgatgaagctgaaagctcagcagaaagtaggccaagagatatggggtccactcaaaatattttcatctttaaaatgaggtgaaagcaattggaaaactgtaatgtattgtaaatattaacattctaacattgcccttcattacatgcttgtgagactagtgatagtcactgagacctgtgaaaactttcggaagcacatttcaaatgcaacttaaaacttttttttttaaattaacaagcacataatcgatatggttatggttaacataatcgattatgtccattcaatttatataaaaaaatgaggcataatcaattatattccttttaattttaaaaaattatcaaataattaggaccagctaaaaaggaaatttcatctgggttgttgaacctaatctagcatgaccgatcgaacctgtcggaccggaacatggtgacttaactgggttagtttcactattggatcgatcatgtaattgacttggtcaaatctgactgggcaaattatcgaatcccaattggaccagttcaaccttaccatgatttaatttaaaaataaataaataattttggaattttttaaataaaatttgaattttggattattattaattgttattttggatatggataaaattttcttactcaaataatgttagttatatatttatatataataaatatataattttaaatttttaatatatattggatcaaaccaaatcaattattgatctaccagtccgattgaaccactgactcattaacctattatctcgaccaatcaaataaccatatccaaagttttacaaatatgaatttcacacttgtttaattttaaatttgttttcttttattttctacctaaccactttaaattgaaattttaatcccttttcaattttcaactctctttttcatttataccgaacaatctcacttttatcttttttcatgtcttacacttttatttttttcattcatctttatcaaacacaatgttaatgttaatgtgtttttgaatttttatttgtgataaacttctgaactattttctatgttaaaacgcactaaaacaaattatttgttgcattgatggagctcgtcttattttcacggacagaaatccaaacacgtactacatacataatatatcaatggtagtattttgtatttttattttactttgtcaattttgaagtctaattattttcctatacgagcttgattccttttctagtttcaactttctaacttctgaatgaaatcacgacctgaaatttgaaaatcaaaagcatcaaacagccaattatattaaattggcggtcgtgggcttccactgtccgccctttaggactttacttcggaatttctttttctttttctttttggtgtactacttgagatttgagaatgcctgacgtcataacatatatatatttggtatgcgaagtatttatattttgaaaattgaaaaaatattttgataaaaggcatattataatttttatacttttttaatcaatatagttatctgaattattaaataatactttttcgaagactacttttgtgtatatatttttttaaaaaagctaatactatcaataattcaatattaccatttcaggtgacaaaacattgttaatgtaatttaagaattaatccattagtaatatcaatggaagaacatcacgtctgtgtaacaacttagagattttgagaacgtaaataagtcaaattaggaatactatacaattgtaaaaggttacaagataatccttgtcataactggtttgatattttaattttttaattaaagtctgggatttaatcatcggtttgaatataaaattacaactagagataacattttatcctaaaattaggttgacccaattaaacatgattagttggatgtcaaatattttttttaaatacatctgatcagacaaaaaaaagttaaaagataacgtaaagtatattttttatcaattgttttgagtgattggaaagaaaacttgcattaataatgtgtttggattagattaacaatgaaataattaattaaatttccatgttaattgtaaagcaacaaataatatttaattttttcatgatctcatcatgattttggtagaataaaatgattcttgtatgttatccaaaaaaataataatcattaacaactataaaattaataagtttaattcttcaataatgattaatcattagcaaaagtaagtaaatactttacactaatagatagtgatccaaaaatcaattgttttaataggatattaaaaattaatagtaattattgtgtttttatcacgcttagtgtgattttcctcaatttgcacagaatgatcttaatggaggatacatttggtctctctttctataaacggaggaacaacctctgcaaaaaaaattcatctgtttgacgtgaaaatgaaaagaaaaagaaaaacacacacaaaaaaaaaaacgcatgtcttcaacaggcaaccaaaaacgcgtgtaacatggacatggaggctaatgctactttgttgagtaccgtatctacattcgatttctctatttttagaggttcaaaaaccagttaggccatctactctggtgttgcaacctgctattgtgacttgtgacatccatcacttctaagacattgttcaaatcttcataatttcgttttggttattttttagttatgttagattataagttttcaatattgatggtgcatgactaatttaactatgcatggtttgtactatgtaatgtactgtattttttattagaggtgtctaatttaattgttatggtgcatacgtgatttgttttttgaaatacatacgtgattttttgttgttctatataattatgtaatttcattttgaacgattgattatgactcaatttattatattttacatttggtcaatttattttaatatttatgaaataaaaatttatttggaaatccatatgaaaataaatttaaaatgctggataaagttatggtgaaaacttaatagtaaaaagaataaaaatcgccgtctgtggggatcgaacccacgaccacgtggttaaaagccacgcgctctaccactgagctaagacggcttatatgttttacaattaaataatttaatacttataaccttaaattgcaagtgtagctcaagccttttcgccttagataaaattggccaggatctatatattccgtaaggcttaacaagctgtgctgcagtttcaagcggctcgaacctcaatatctttccaatattaaatggaattcccattatctatcgatgggtataagcattcttttcatcctactacgtataatttccaccacaatcctcacaaatggtgtttaagattctggtattacctctcatatctcttccccattagatattttcaatagtttttgttcttaaataaataagtctgttactctgcttgataatttttcagttaaggtttcaactattgacaatgttcaattaacataaaatcttacgtgtgttgtatatcactatatccctttttttaacgagtcaatctaatttcagctttatttactgtcagattctaatctatctgttaaactaacttttgaggaagattgttacggttgaattatatcagaagcctctatctccttgagacgtgatggcacaatgcctcaataaaaaagactctagctttacaattttcgcaattgatactattcatttttaaacaagtggtgcacatgatgattcgttgagcctatggtactctagatcagggtgtgatcacacagtcctataaatcctgtgcaataaaacccccctgagatcccctcctcttgattcaaagtgttgttttgtaccttgatcaaaattcaaaagatcgtctttcgcttctaatactaatcggatcttttcttttcttttcttttttccctctcgcaattgttgatgtcttgatgattgcagccgattgaactggggatatttgatgcagcacatatctgaggctttctcatgaatcgggatatttttttgccatagggagaactacttattctaattttaacaggtcaatcaagcagttcatatctaatgatgcatagaagcttctcccacatgacatgttgaaatcagtaggcactaggcacagaatgtttcaaacgcttcactgatatccagtgaagaacactccttacagaattttttaaattacctgtttccacgtcacgaattaatagcacagaaattccagcatgtaatttttttggtgcatgtccagcatgtagttttatgcaagctagttattaaaagaaattaataaatatgtcagttttggaggcattcccagtagaacttcacttcccatatttcttaaattgcaattacccaactggttcaaggggataaataaaaatggaaacaatggatcaactggctcgagtaactgataaatcatttgaagcacaataagaacatgcaccttgcaattcaaggatcaacaaatttatgtaatctaaaagacaagccattgccatgcctaaaacaaacataacacatccacaaacaatgtggcattccataattataagagaaatgacttcagcagtatagtagctccctagatgaaacattccaagtgtttatgaccaatgaattcgaaaagcaaacaattaaatcaataaccaaacgattcccgaaccagggtaaatgcagaccatcaaaatccatgcaacaatagaaaagataacatattgctcaagttctcatggaagcaacacacggaaaactcattcctacactgaaaatgaacatatccaaaaccatttgtattaccaaaatcgcattaatctcaagttctcaacatcattttcctgaagcagaacatacctagactagtaacagcccaatcacacataaaagaaacaaagaaggaaacaatgttgagactcaaatcaaatctcctcgtccccatttttcaaattggatatctcaacagtcccaaccctctcattctccggcaaaaccgaccaattcggagactgcaccgcgcgcagccaccggaaatcatccacattgctccaatttccggtctcggcgtcaagaccggcaccacgaagatcctcctcaatcccttcatatctcaagcaatacggcgcaaacctgacgccgttacagtcctcaattatgggcctgctcctaaccctaaggtagaaatcgcttcttttggcaccgtgaatccgaatctgatgcgacgccaacgcaaacacgcaaccctccgcttcctcaatgagaacggacccggtcacggggcccacgtaaaccctagaattcttcaacctgtgaacgaaaagcgccctcacagaacctattatcctcacttggcaggaatcgagatccgaaacggtgaattccccaacttcggaatccctgaagtcggcaatcaaaagctcaccggttttgtttcgaaaccccggcgagtcacgcggcgcaaggcccgtggagagttgagggggttgtttgggtattggaatagcgcaatccttgtcattgtcgtccttcttgatggtggtggtgggtttatttttgaatgagaatttctttttggggagaagttgggaagtgaggtcgtcgagggagtgttttaagtcggagacggttttgagggaggttctgacgtcgtaggagggtagggcgtaggagttttcagcgacaagtttttctaaatcggagattgattgggagatttgattgaagtggagtttgaggttggaagggtctgaggaaatggattgggattgggcgagttgggactctatggaggtttttagatgggagaagcgtgaaagtatggaggaagtggaggattgtgatgaagattcggggttttgtgaacggatttgggtgcgtttggaaaggcgttcaagcattgctaagtgcttcttctgtttctcctcctcctccattggtcttttactggttgagttgacctaattggaaggaaatggattgatcaatcatcaaagtgatggatgaatagagatttgagttatttaagatctgggttccttcggtgtggatgaataggcaataaagaagctaaccaaccaggtagctcacacattcgcgcttgcgcatgtggcgttcaagggtactgtagagtgtggactgtgtgtagttgtgcgtctttttgtttttggaggcggacaagtgtgccaacttttcttgctgggctgctttgggctgttacacaatttaatttagataataattagctaaattttaaaaatattaacttgttttaacattttttaagtaaaaatttaaaaaactaactttttttaagtttgataataattgatagaagaatatttaaccaataataagttgttgattatggactcgactctcttaaacaagatctcatatttgaattttgtaaatggaaaaaaaatgattaaaagaaaaaatttattaaattttaatcattagcaaaatgggtgaaaactctgcatcaatgtcatggtgacaacaaaaaacaaagaatatttaaaatttgataaattgtgtcccttccaaaaaaataaagacgaatgtgtttttttttatttaaaaaaatagattttaaatttagctttataggcaaacagtgagtaatttaagttatttcgtgaaattataagtacggattactttcgttccaatgttttttttattaaaaaaaatcacttagtacaaaattatttatatttcagtccttgtttattcttacatttccatcatgtttttatttagtacttgattatcatggtagtacgataaggtccacctttgcttgtactctgtctcattattggttttcaatggagcctctgataattagaaccttttttcatttctaaaaattgtttatcaagaatcatgtttcttaaaaatcataatttctgagaatgttacaaatgtgtctggtatatttaaaagattcgcaagaatgttatcataaacatagctaaaaaaagtaactttcatggaactttgattctcttgaatatacctcaggtgatacatcaatttcatttcaaagcgttaagatgatggctaaatgattttaggcaagttctctgttccaaccaacggggttgagaatgtaggcaacaaaatgagaatgtgtggatggatttgtacacagtaatatatagtgcattaattagaaaagaattaaggaattaattaaaaagtagagaattaaaatgtaacaaaggaagattgggctgtctaacttaacttcaaataaaaatgagattaaacatcgcatcatagattattagtgcaagaaaattgtaccaacccactgtaactaataatcttatctctttgttgaacaaattactaacggcaatcaatgtaatacggaagttttctcttcatcctttgttatcaaggatctgcagtgcagagcaaacaaatattgtcacttccattcatagtatttttccttccacagttttttaagaattatgatgcccaccggtggaataaattatcacagacactatgcatgaataaacaatgtatcaccattcatgtgattcaatccggatcaactctttcacgcaacatttggttaaagagtgtacagcccacatgccatatccatgccgtgcacaaccaattttcaggaaacaacacttctctcattaatcaccttaaacacagacactgcatcactgatataaccacatttactatacatgacaacaagggaacatcccacatatacactactttctaaacccatcttaaccgctgaagaatggatcactttcctcctctcaagatcctccaatccacaacaagaattcaaagcactggtgaaggaagattcatttggaaccacaccaattctcatcgtttctccaaacacctccaatgcctctcgatgcttatcattgaaagcttaaaatttcaatttggtaacactgtttttcccgtagacatcatgacttaaccaacagaccaattatcctcaaagctaaacataacttccattaaattttctgctgtagggtgaaccaggttttcatcaatttggattttttatctgtatcatcagatcctaccagggcatttaaaaggcaagtcactgcttaccatttcctagacccagaaaatattacaagaactacacctagattacttgctaagaggcaagtgtttctgcttaccattacactatgagtgaagttttaaaacaacataattgttaagtagtaatcaaaaaaggaagctataactaatcttaaatcatagctacaatataccaccttcttctttccactatctctccacatggcctgaaaaggcacaaagttattgaagctgaggttgcagatttataatttgaaaataatcttgttagattggggaatgagactgtagcagaagttactttcccaaataaaacagtcataggattaaaaaaacaattacatattggaagggtacaactttgatggtcaggactgaaaaaagaggtgaaaccaaagcatgtatacatgagatgagatgccattgctaaatttttttgatattctaatcctttccgtggaaaataagattctactacaatagaaaatgaaggagttcaggagattggtaacaaggtatcaaccaggaaagaaaatgcatccaaaaacaaagcagacacacaattagcaatcgccaatagaatcatccaacaaagtaatcaaactaaggaaacaccaaaagtattcacgctctctgtcatgtccatacattaaatggctaaggttctgaaaccattaacataatttaaaatacattcatacaagcaagtgcaggtagcttacaatatggcaaaaccaagcttggaactaaccataggagcacattggcactttgccgtcgaaatttccaatactgtctattctattatctcttcgattatagagaacaaattcatcatatatgcagtttggaagcatcatcatatcatcactttcagagatgcacaaaggcgtggtcagcaataaatctaattcatgagttggagagatttgaagattctgataacttatattcaacaactgagtccaggatttctcaactccaaattccctcattagccaaacaacgaaatggcttcttctcctatgagtgtacgaaagacacaggcaacccctcaaagccccaaccttaagaggataatcaggaacttcagacagaccatcaggcatggacaaatatttatatgtctccttatttagatcatacgaaaaaattactaattgattgacagtaacagtgttccattcataatcaatacccaacatgcgaaatgctaaccagttaacgttaccaccgacaagatgtccgttgagtaacctccgactaatgggaaaagcagggcaagttaaaatgtttctccagcaagtgtcgcccatgcagtgaagtctcacctcccaattctgtgatttagtattgaaacagagtgccaccacctgtaagtgtcacgccaatcatcgtaaccaaacccaaacttcacataatcctctaaaagtatataatcgcgtcgacgtatacgtaagtgtggcgactcttgggacaggatccttcaaaatcgtacccagtattcaaaattacctctacctctaacagtaaattaacgcaagccaataaacccattgcaggaagctatgaaagagtaaacgtcattgaattggtaatgatcatcaaaaggagcgggtgtggattctcctcaagcaaacaacgtaaagtatttcaagaccgtcagtttctttttcatcatcttcgggatcttcttcttcttccggcgttaacaggacgtgggcgtttgtggataacctttgaaggtgcaatttgacgaaggtggggtggaagataagggaattccaagtcttagaaacgcaccagaggcttcaccggaacccatgacagaatctccactatcagctcctcagggagcaccatcgccatcttacactgatagctctttcaaaaccctggcggaacagaactcacggctcattcatcattttggtcttttttataacaacatgaaagtgaaactgttacaaaacactttacagtttataggcttgggtctgttttcaccattgaccgatcaagattatcttttgacccgcagaacgtgtcatgttctccttgcatctcctttttaaacttgttggttgtgttgcagctagcacagacatccacgcgatacttgataaatcttacaaaaaaagcatataaattttaacataggacacattttaatattaaataatatttttaatttatataatatatatttcatttaaaatttaataatttaaaaaatattaaactaaactaatgatatccataaatataatccaaaaaaatttatagagactgcatttcattctacaaaacagaatattcaatattaaaaaaataaaaatgaaaatagtacaagtcaagctacaagattcactaattcacttgttcaagctaggcacagattatcatttattaggtattaaaaaaataaaaatagcacctagacacaaattatcatttatcatgtattaaaaaaataaaaatagcacaagttaggcacaaattatcatttaccatgtattaaaaaaaataaaaatatcaggtattaaaaaataaaaatgaggtttcaaataacacaacccatacataaacaaggtattacacaagcaaggtattataaaatattgtagtccataaatgatatttttttataaaaaaaacctacaaaaactaatcaattaaaaaaagcacttagccacccacaaaggcccagtcgcccagacccgcagcacttaccttacccccaggagtgagatagcggtgcctcgtgagaagttgaaggagatgagtcacagcgacgaggtgcgagcagagaggagacgcaagcggcggcgcgattgatggtgatgcaatgaacggtgacacgagtggcggctcgtgttggatatggctcatctttcgcagtcagatgacaacccttcttattgtcggggtcagcagaaagtcaactggggtcccgctcccaggtgagtgggcgggggtccggggggcagcgcccccaggcccgtagaggctaggtactgttgtgtaatattttacttttattagtagtttgggctagggcccatgaatagctgctgttagggtttcttttaatcctatttatattcccttgtaaaccatgtgacttgtaacgagtggcggtgaggtgattatagaacagacaagttggacgtagcctacattgggtgaaccagggtaaattactgtgtcatatctctctttcctattctctgttctgtttttcgatttgtgtgtgattgttgatttccaacagctcgaacgatgacgcactgacgtgaagggcgcgcgaatggcagtcggaggagcgaacggcgtgagtgttgtgaaggaggagaaacaaactgcatgaaaggctgaaagctcaataagtaagggttttatatatatttttttattttagacacgatcaaattcacatgtggactacggtcaacgtgtcagagatgttgaccacgtgtctgacaccgtatcagcgcgtgtcggatcgtgtccgacgcaattctgctgatatttgtcgcgtccgtgcttgataggttgcaacccatgaaacagaaagagaagctatagagagagagaacacaacacttgttgtgtcttcccgtacattaaatattattttgaaatatttttaaattaaattgcaatattagtaacatttcctaggtttcgtccattttttttttgtatttctatactaatcctcatgattatttaaaattgcactagtctctacatgggatattgctataaatgttttaaaaaaaataagaaaattatgtatgatctataaaaatctaaaactacaatgataagttaatataatttactctctcgttttatcaaagtagtaaacatttcggaattctagtccgtacgataaatcgaaacagtaacatctcattcatgtgtgaaacataaattattttatttatacttcaaaagcaattctattttactaaccaaataaaattaattcttctcaactcagttttagaacatcatgcttaatcactataataaattttcaaaatcttccaaagtcaattcgaactcgacttctattattggctgaagaaatccatgggaatattgaaaatcttgccatcgataccctaacttaggcacttgattgaaaaataatgttaaaagaaataccaactctgcgtaatcacttgccctttcaaaaacagacatgcatccccattctgattgataaattttgtcactttgagactccaaaagttgatagtcattcataaaacaaattaaaagcaattttttaatggaattggaattcttaatttaatttttcttttacctaatttgaaggatgtgaaccatgattttgataatcatgtatctttagtcacaaaataaaaggcatgaatgaaccttctggcaggaacaaacataaattactacgattaagatctattatacacgagacaattatgactgaacaataactttaaccattgaactctgtaacttgcatatttatgtgtaagctcatgcagctttttcagcttctgcagcttctgctgctgcttcttcctcccggagcttctttaaagttggaggtggtcttacaactatgcttttcttccattttttatcaagctttctggacaacctcttattgataccctcctcaatttctctttcccgcttcacagtaagcatgcgagcaatctgtacggatatttgcagtcacattatcatgcacccaaaaaaattaacatatggacaagaaatgcacagcatcacgccgactctagagaaagaacttatttgttagtaaagccctctagtatcatttcatcatcatttgaaattatacgtaaaggaaatacactaataaaatataaagatgaggctagatcagtatcgccagattgaaatgctcttcgctctttccattaggcacatcttgtattcaacatgctatcaaagcactatgatcccagtgcactgtttgattagatggtggctttaagagtaaaaacaaaataaaatgattgcaaaacaaggactaacatgcagaaaaagattggcatatttatccattacagctcaattgagtcaaaattataagtttataacccggccaaataagcatcagaaggtgcttggagttggacacacctgggaacagaagttaaagacattgcacactacttcataaagaaactgaagtgcatctagcagaactcaaaaaacatgcatataagagaaacacctgatcaagcaaaagaaaaacctagttcaagtattcctacatgcatgttgaattactttgcacatgcatatctatttctcacagtattttcctgctcatagcatagagagatgtgatgctcatacttgaattttatttttgaagtaaaagtttggcaggtctcattatttagatctataccagaaattggaatcaaatgtaggggttgaaggaccattcaattcatcaaagggcgttgatctctaggcctctttacttggccaatcaccaagcatagagctgtcatttctggattagtagcaggtgggtgtgccaagcccagattaccatgaaattagttgctggtcttactctgatcaggttagttgtcggcaacaaatgacaatttgtttctaagtgagccctctcacttgggagacccagagagttcagacagtatggagtaggagattcaaatttatgaccatagattggattgatctatgtgaatctaaccaaacaaaactgagttatcaagccatcatatacagtggctggaatgggaaaagaaatccataaagggagggaaatagtttacataaatataaacatatattgaagcatgaaaaaaaaggaagcagaaggtagtggattaatttgtctatgcataatttgtgcacagagcacgccaagctcaccctttaccacttcatgaagtaaaacatatgattagctgagtacatgagctatattgcttaagggtgcatttggataaacaatttaattgtgtttagttgtttactcaataagctcttatcatatgaggacttgtgtcataaatttaatcataaaacttattaaagataaaaagagcttattttaacaagttactctaagaaatttattgaaaaaagctcaaagcaacttattagagttataagctatttctagaagctcaagtaagctcatcataagctcagcgaaacaccccctaaaaatactaccaaattggagcctttcacctaacactcgagtaagttttaaactgcaattgtagctgcatcggctgcattgatctgcaatatcaaggattgcaacaaaatcgcacccgcaacgtcaagggttttttgggtctacacaaccacaattgtggccacattggccaaatttgtccacaatatcaaggattgggacaaaaccatgtccgcaaccgcagtttaaaacattctcaagctaatcacactagctaatttcattataaaagcagagaaaagcaaactaaattctctcacaaactcccaaggctagcttgtaacccagaacaacaaaaactattaacgtgattagattatcttattttcagttcaaaagagtttataatcaaaatcatgacaagggaacttaaagaagaacaaagagtgaagcaaaaatgaagcaccctcttgcgcatgcgaccgaattcgctggacttgaactcgttgcgagccgatttctgaaggcgaagcatgacaagctcgcccttaaggtcgacaacctcttcgttaatttgttcggtggtcatttgtctaatttccttcaattcctccgtcctcttagacatcatcaccaccggcaccgaagcgctgcgtttcgtgggtggaatggagcatgtggcagagcgacggagctgaatgccattgaatggcttcgggagaaaggaaatggttgaagaagagggtgaagcaactgagagacttaacattctccacgctctctctctctctctctctctcctcttattaccagcgaagtggattcagagtgttgcagataagaagcaacttcttcttcttttatcggcttccctgcgctacccgaaatctcccttttattcctctttttcggggaaagaaatgataaatcataactatattttattctagttattttattaaaattcgttttggtactttacttttttaaatattttttttttattttttaatatcaattttttaacataattttaaaatatactaattcaagacgtaaaattagttccaataaatttacttacgtgaaaattataaatcataaggaactttcaaactaaaaaatataataaacatgatgaaaaaatgtgcaagatgaataacactaatgattataaagaaaattatattaaattattcaattttttgattgtaagtataattcaattttcacctcatttttaacatgttgataaaaattcaaaatagtattcttaaaaaaatgatagttgtttcaaaaattgacccagtttgtgtaaaaaaaaaatgtagttataatagtttgtccttaaagtttgtgaaaggaataagaactaattaatatcgcattcatcattttttaaggtttcaaattattcttgtatccattccattagatttagaagaataaggcaaagttacaccatgtagtacctccattttcataaaagtcattaaacaaagagtatttatccatatattttaaacacgacacaaaccaattagtcattcaagaaccaataagtgggttaagttaactattgtatcatgtatgttattggaccagtgcgacgacatcaaaaccatcatgaaattgggttcaactcgtgaaattcaatcttgagtggaccatatatggcccaaggtatgtcatatgcttagctaaatgtgcatggcccaaggtttttactccctttgttataaatgtgtggcccaagtcacgatgttgtgcatccgaattgtcggtcttgctcataggtgtacatgtgttgttattgatggctttgatattacaaatacaaaaatgaacatactagggatcaaacctatgtccatgtatacatcaacaaacttacttaccatagcgtcataacaatcatttgtgatataattgcaaaaactaatacatatattcatattttgattttaatctttcaatcagttaatacaatttagttagtaaatcactagttcaaccatcagttcacccctttagaaaaacttttgcttttcccaaaaactagattaatcttataatcactaagataaaaacatgttattttccatgccctataagaggatagtaggtaaacacatttctgtttgtgcacatatgtcgggtagcccctatagtctactgtaatttttttcacattggtcacaatattcacctaaaaatcaaccgcaacgataacatctcctcctttaaccaagttgaccctaggcttaagaggattgtcatttcttgccaatattttttttcatcgatcacttggcatttttttttgtttgtatccttaattatgatatgtgcgattaagcctagtaatgacatttatttgtgtttgtatggttgtatttcagttgttgtctgtagtttatccatggttatggaaacttattgattagtaactttgatataaacttatataaaaaaactaaaattacttacctcattgttcagaagcttgtttccagatttgaacccatgaccaatgagtcattaagacacaactttatcgttgtgcagcgctcgctctcttgatataaacttatagaggagaaaaatattttcctacctttaactcttcaagttttttgtgatatgtgttggtctagagtttgatgtcattgtctttcgtcatcttccaatcataatgatgtttttatcatgagcctccatttgtcaacatcctcaacaatgtacttcaagatcataaagtcataaatccatttcatttccttatatgaatagtagacgtcgaagagattgttaaatcaaaatactaattatggtttgtcaacaaatcttattggcatatgtgaactcattgattttttatgatttgtatagaggtttgactttgggtctataaaagtagatgcaacccatgcatgtccaactttctctaaattaatatttcatatcctagaaagttcttgccaacaaagagtttgatctttgacacatttggaacaatttggcatacatggccaacaatgacaaaagcaacatgctatggaatgtagggttcgacgattgcatcttcatccataagttattgatattgtagtttttgtagccgaagaccattgacaatccaacacaaataaagatgaaaagttgagatgcatgtatccttaaagacttatccgcataatgcacatatcctcaagatatattaggtctttctcaatatatatcaagttagcaaatatagtaataatgaactaagtgaggttgataattcataaattttagttgaaatttattgaattttcattgagttgaaatgcttcaaataaatttgaagtttattgtacacaaacaataatttagtttcaaaataaaaaaaataaaatgtcatagatacacccatgcaacaaatgataaaaaatatggacaaatagtttatgtgtatttgctgataatttagttcctatacttttaaaatgaataattttaattcataagtttatcaatattgcgaaaaaaaacaaatgtgagcgaatgtatagactaaataggctatttaacttaaaataaatccattatttctttattatttttcgcttaaataagtttttcatatctggaaataggccgtttttagattactaccaaacattcattttttccaactaagtacctaaaaaaattatgtttcaatgtagtacctgtcgttagtccccttttgttaagtgtgacgtggcagacatagtgtcatgtcatcaagccttgtcactaacacgtcattgccatgtcatttccttcttcccttttcccaacggaaaccactaccaccgtgccatcatcgccatccgacccaacatcaccacagccaatcgagccaaagcgtgtagggcagcgtgcaactggaactgggttttgctccgaagcatgtgtaatggtcctaaaacctttctcgacagtgtgaacaagtggaagtggaagcgcatgcacgagaagctcgccagagacaaacataacagactcatccaataagagaagcagctctaccaagcttgcattcgctcccacatccgctccaccctttcccccaaccaccactccaccgcccccgccacccaccgccctctctccccaacgaccacgtcaaagccctagtcgactacttcatcaaagacaatgccaaagacctctagaacaaccacgacggttctctaactctaaacccgacaacactaaaccttaatttttgccccaagcacactaggggttaccattctgttcctgaggttgggaacaatcgtgctgaggcccacaaatataggttttggagaaatggtagtgattattctacgtctagtgagagcaagagtgagagtgaagttgaatcgagtgtgaagaagaagggtaatagtacttctttaggggaatacgatgtcaagagagagaagagggttgtgcccaagagttctctagagattatgcgagatcaaaaccgcgatgaggaactctatgaagttcatgagcaacagtttgaccattgtcacgaaggagaaggggaaagggttgttttttattgacagcgcagtggtggcgcaatgacgcggtcggtggtggtggcactggattggacggcggtggtggcatgtttgtgatggttttcgttggaaaaggagaagaagggaagaaatagaagtagagaatgacgtgtttaatgataaggattgatgaagtgacatttcgtctatcatgtcatcatttaacgaaagagaattaaccacatatattaagttgaaatatgatttttttcatatatttagttgaaaaacaaatgaatgttaagtaataatctaaaaatgacatattttttatatatgaaaaattaattaagcctttatttttcctcaatttttctttaaattttcatcagcattttcgtcctcactctctcgcacgcgaaacccttgtttcgttccctgctcacgtatctgtagagaaaaccagacacaagaaaaggttcgttctgagacaaaaccccaacgatccaaacggtcattgagcatttcatggtgcgagtcactgagttgaatcggataggaatctgagtttgtgatcgtttaacgcggtcatgggtgctgcaggctccaagcttgagaaggctctcggagaccaattccccgaaggagaacgttactttggcctcgagaatttcggcaacacttgttactgcaacagcgtcttgcaggtctttattccgatttacgttttttacttttccattctatttttcgcgttctatagagactctaatctgttgtgttgatggtttattgattcttctatgcaaagtttgttgcagtttcatatgtatcttcaggagagagtttagtacttaaatgtatattattgttttggacattctgttgacctgtttagcagattcttttaagcgctgattcttagttttattaaactttgaagttggatttgctcttcaatgttttatatgtttcattcaatagtattatatgcgtctctttagatgcatacgtcaatttaaaagtagttgttgtcttgttgcactcaatatgtttaccatctctaaaatatcaatgagggcactagatatgtctggtgataatacttgaagacggtcagtttgttattttttgtaaaggcttttagggttctttgctaacaactgtctcattttgccaaattgtacaggcactatacttttgtgttccgtttcgtgaacaattactagagtattatggaaataacaaaagcatattggacggggaagaaaatctcttaacttgcttagcggacttattttcgcaggtaaatcagtctttagtttggaaatttctcaactttacatgcttaatgcctctaagcttgttcatatttgattgggtcaagcatgattcactatttgaaagttatactgtcttcactggttgtggctattttgcttgcctaggactctcatgaaataagttgttgatttcctagctttttttttattcttcatttatttaataataatatgaaacaagtacctttttgttctttgcatgcttcactgtggttcttgttatctttattgttgaatctgtaaccatgttttctttaataacattggccattaaatagacagctctgaaaaaactcggacaaatacattgcctccatttaatccaaaatctcgctctcgtgatcgcaattaagcacttgcttttcctcatagacttcctttttctaaccgttttatggaaggatttttagaatgttgatgaaagatgctcctgtaacagagaaatctgcatgccaatttatttagtgcttcagtacttcccagcaaagcatactgtgggttttattctattgatcagttgaagtttatcaaaacatgactagctacttataatgcctaaaatatatatgcccagctagctgacatttttgttagctgttctatattttagttgctctttgtctgagagacaaggaattgacaaaggggattccatgtttatctaaatttcgtgttgtaatatgctcgggtataaatgctattattttttttgcctgttgtatggatgctattatttctccttgagaaatttcttcatttatccacagtgtgttttatgttggtttggcccatttattttatttgttttccccctttctgtttgccttcaagttatgtgaaattggtttaggcaattttatgcttccctaaatcttctttatagtatgttcgagtatatttttgtgtgcctgaaaatggctctgcgctatttcatcgtgcttttgcaagtatttccattttgtatatctatagaatttttgctcaattcattgtttcaaatgtctaattaataaacacatgtctatttaatgggcacttacacggctatctcttatgcctgagaacttgcttcaagatatttgtagtgtgccttttgtaagtatcttcattttgtatatgccaaataataccttccatttattatcgctaatcaaatgtccatttaatggcattttcatgcctatttatttctttcttggtcatgaatgtaatataattatttcttttggtgtagataagttcccagaagaaaaaaacaggtgtcattgctcccaaacgatttgtacagaggttgaaaaaacagaatgaactcttccgtagctatatgcaccaggtatgtgcttaaactgtcaaaaatgaacttcctgagcagaaaggtgattattctagaaaacctgtaaatttcttttgactgtaatgtttatattataatcaagagattagttttatcatagtcacacatgcaaatgttgccatgtatgcgtttctccctgcttatgaaaggattctttgcttgtgggcatcgttcaccatacacaattgcccttgctcccaagtagcagcttatttaaataactagagattctatcatatgtattaaagatttccagctggctatgttttgaggcaaattactagttgtcctcttggtagatcaattattagataagtatttcttttgtaatgcttctgtgtagtaggttggaccaaattttcagatttgcaatttgtacacttgaacttggtgtgaacatcttttaataaactggaaatacttttgaactatttgttataatattaagttgaaatgctcatgttggttgtacacttttcagtctttttatatgcaaataagtctgtttacttgaactggagcatatacactttaaattgtatttctattatattattatatgtcctgtgggaagcataatcttttttatatcagttttccatttggcaacaacccttttcactttgtctagtcatgctttgactgtatatcactgatatataaacggtgctttggcttgttagttccccagtcccccctcccctcttttgtgagtaaataattgtgactcatgatgagtgtccatctctggaaatgatttattcgagtttgtataatgacaatttgttgcttttcagtgaggttgtttaccataatgttactgaactcagtgtgctgtaaagtgtattcgttatttatcattgattgttattatctgttaaattcaatgtttcattggttgcataatgtctcttattttgtcaaagtttttcattagagacaacattgttattgtgaatcttctcttggtaggatgcccacgagttcttgaactttttgctgaatgaacttgttgacattctggagaaagaggctcaggctgcaaaaactgatcaggagacatctccaccttctgaaaaggctgttaatgggcccaagaatggtcacgctaatggtgttcacaaagagcctttagttacttgggtacacaaaaattttcaggtggccttgctttgtcaattcaatgttttcattttgcattttgcctgcaacaaaatttgaagggaccataattagcaaactttctatcggatccagtcaattagtgttatctctttaagtgggcatgtattgttacatttaagggtaattcattcatattggcttttatgtgaattataatggaatttggcatacggttatagtactaatttattatagatgaactttattattaaacaatgtaaaacacagtaatttcactgtcaatttttatgtatttttcttgtgggggaaggagtgtttttgttgctctttgtactctgtagtaatcagaagaataagatttacttttatttttaggatttttactgttgtaacttgctctgatcagggaatactcaccaatgagacaaggtgcttgcaatgtgaaacagtgacagctagagatgaaacatttttggacttgagtcttgatattgagcaaaacagttcaattacaagctgtttgaaaaatttcagttccaccgagacactgaatgctgaagacaaatttttttgcgacaaatgctgcaggtatatatatggcttttaggtacaaattatgtttctataattatctgaaatccgaaatactacttctttggcatcagttgttactttacttggtttcttgagtgttctggaaaatttaaagagcttgtttaaccattttgaatcacgtgcttagctgaactaatcttctgcttctttatctaagaacaatagcaataaagccttgtactactagattgaattgactgcatggattaattgatgtcattgactttattgaaaaccaaatattcagaaaatcatatttggatcaagatcatctttaatagtgtctcgtaaagttcttaggtacatcttctaccccttttaactggaggaataaattgtttgtgatctaacacatggcaaatagcttgaatatcatctatggtttatagaaaattttatctccttttaataaaaattagaatgcgctgctattcatgtttattgactaatactacaatttaaaagaagcaaactatgatacgttcatttttccattgattgacattttcttctacctgttatctgagtgggatttggtagccatgtcaatttagtgtgtaaaaatatatgtgctctgttctcttgtttttcatgttcattcaccattctgatgaccaagatgccaactttcttgtggtattagtttgcaagaagctcagaagaggatgaagataaagaaaccacctcacatcttggtcatccatcttaagcggtttaagtacatggaacaactaggccgctacaagaagctgtcctaccgggttgttttcccccttgagctgaagttgagtaacacagttgaagatgcggatatcgagtattctctatttgcagtagttgtccatattgggagtgggcccaaccacgggcattatgtcagtcttgtgaaaagccataaccactggttattctttgatgacgaaaatgtagagatgattgacgagtctgctgtgcagactttctttggatcatcacaggagtattcaagtaatacagaccatgggtacattttgttctatgagagccttggctctggtaacaggaattaggcggaggatttctataactctcttaaatcatttggacttcttttttgcatggtttccatatttattttcctttctaccgttttccctttattcaacctgttggaggagctgttacatcctctagaggatacgggttgtgaaaaggtatacttaggtggttggcatgtacagtggatagtgctaggcaccgtccttttttctttttccactttctcacaataagaacagtatatatatcgggtgaaaatttcaccaacgatgtgtattcatggttgcaagcgttcaaccaacattagaaacacaatgaaatggaaattggtcctaactcatgttagattattttatattttatagattgacgaacactttggtaatagactaatagttgggcattctttggtgagttaacaaccctgtcttcgtcgggactgcaaaactcctaccattgtcacttatttcgattaggttataaatctaaaaatttgaaccgaatcgtttgagaacaaagcagaactgaactgaatcataaaatttcccttccattttttttgtatcagtacacaacataattcggtccatttaaattcagttcatttaaattcggttcaatgaacagttcggtttggatttgagaaaacaattcgtcagataaaaaatacaattcagtttggtttaggcaaaaaaatttagttcagttcttccacagttaagtttggttcaacttttaacactcaaccaggggatatccagcaatatctaactgggaagaaccttggttcctccttacagctgactgagcatgaattgaaaattttggcttgtgtaagaaaactgtgcacggctcatttctgcatttgatagggaacctgacatgtttattttgcattgtaagaattgttttaatagctatgcattttttttaaatttatgtgacatgttagcaaatcaccccttaacacaaaagaatgagaattaagattactaatttactataacaatcaaagtgagacagttgatcacctaactctgctgggaaattccaagtcatacaattaacaacgaaagctaacttctaagttgttgtaggcatgaaaatatcttcgtccaacaatgcttcaagatcattgaggtcaccgaattctctcggttcttctgaattgttagaactgctctcatgctttacctgcaaaagacatatacagaagtctaagctctactggcagtcacaagaagatactatattcaggtagtttaaacaaatatacatataatttcttaacaagctttttaaggtagcccatccaatatacacctttaacagcttcattcgatagaagcaacttattttttggtttcaaatgaggggattcaatccggggatcaagccagtgccatttaaggctctttggctttactagaagcaaattgagctttatgtaaataactaaagggagaaaaaccatattcaggccattttttttacactctttttcagagaattcaactcctctgaagtaactcatttaaaaaaataaaataagtaatttgagttgtgacggaaaaatcaagtcatatattacatacacatgcatcataaaatcatgaatgtgttataatattaatcattaattttcaaaatgcaaactgaaattactgtatctttattaactttaaaagagccaaatctttgtacagaatgaaaactactgctgttatatactgtctagaagagaaaatgatttaaagcaggataattgagaaactttttttccccccttttttccgcgagtgagaaacttttttaaaaatatacacaaataggtaaaatacctgattttcttggatctcagttacaacattcaacagcctatggtattggtctcttgcctctggatactgaaccattgacttcaccctagccagggctttctgcaacctttgctctgtttgcttcctgccttcttttaagacatcatagtcatcatctgttgaagatacatcttgtatcatagttccctcagaattggcctccggtttaaatccacgcaaaccactaccttttcgacgccaacgtaaaataaccttctccaagattccaacggaccaaattatcttcccacagcttttcctgacctggtgacctctcacgtgagcctataccatggaaatagacacgttataaattggatccaattaaagggagaataagattaaacattcaacacaaacaataaatactacaaatgctcttagccaaaaggcttagaaaggtatagacataaataataatgccatttgcacatatcacatgttagagacaaatgtacctgaatttttactatgcgttgtcgaatcattaaaaattctcttcttcccttccaactgcggaatttgttttggattcgtactgcagcagcatggacaggctcatcacgtggtccagacttgtgtgatttcacattcatttttacaagtgaaagagcacgttcatcagataatccaagtttgtcatcatcatattccttcagttgttttctctgaaatgattgcattctgaaaacttgatgaatacgagctgcggcttgggtggcgttacacactgcagccagtgaatctttcaatgacagttcatatgataaaccatcaagatcattaacttgagcaatgttttggagtctttggactacttttgctccggaattttctcctgcgttcctgttcaaatcgagagttgtgaggtgtgcgcttagtgaagactcagcaagataccctgcaattcctttgtgtccatttgcagaagctaggtcagctggtgttctaccagaaggatgttctggacatggatcagtcagtgctccaggtgctgcgccgagagatatgaggaaagcaaccgtgcgctccctgattaagtaagatgcaagaacttaatgaaagatgacaagagtatgcaagaaaatgaaaaaaggaactcatcataacaaaagactcaggtgcatcccatcataaatggcattccatccttcaaacataatgaagtatatcgagtatcaacaagtaaaagcattctaacttcttttaggcacatttcacattttctctcggcactaatctattcttcctcacatactaatgctcttgaaaaattgcaattaatatcagtgatccatcctattaagttaatgaaatgtcaaggatgttacatataaattcaattctgatgaaatgtgtttcattcacaagcactgaggtactcacctgccacaaaatgctgcccaatgaagagaagtccatccatttacatcacgaaagttcacattcacaccagcaactattgtgggttctagggcccaatcataaccaagagcagctgcaaaatgaagcacaccttggccaccctcatctaatacattagggcctttcccttcttcagttattttctgaaggagccatgcatgtaacttatctttcagaagattttgaagcagctgctcctgtaaattttctggagaaaaatctttctcttgagtaagtttcagtagcttgtcccaatcatcatcctcctccctcattaaagaattgattttacttctcagttgagatttctcacttacactaattggatctgaattctgaggaaaggcatgccccagggacaaaagttctccaaatcgaatactaaaagtatcaaaagtgcttccactattctcacctgtagtgttaacttctggagtatagttgacttggaaatcaaattctctcacttcactacatgctaatctattggaacaagttacatagaaaggtaccctcccaaccttgtgtggcggagtatgacaacaaagaacaccttttgcaatgatcgctgctggcacttctacctcgccaaacatgcatgaccatttacattgttctgcttcatgttgacttcttaagaattctccagaaatgataacctatacaatttttttcataaatgaagaaataaataatcagaatataactgaaaaataagcaaaaaagcaactacaacaattcaatgaacttgtgatcaaaactgatggcaagtgcagaatatcaaaagaaaataccttaatttctgacccttcaaatgcccagcttggggaatagtcaatgatgctaaaaagctgatcatgagaaacagatggatccaatacataggtgtccaggtgcccttgggaaggaatagttgtgttgccaacctcattttcggtttcaactgtatcccaataaccaccagaagtggatggtttatttgattcttccacatctccaagctctttactcatccactggttgaaactgtcaagcttcttcagaccctcttcagctggaggtccatctaacagagtccttttaaaagagaaatatgtgtcttctattccattggcctctagatttgattttatcttttctttttcattcaaaagtttttcttgaagatcattttgcatgagaaccttgttttgtttgtgtgaatgtagaagacactgttccaaggatttctgaaaatcaacatcattatcttcctgctcacggttgctacaacttacctcacgtgttgagcctgaataaggactatccataggccaactggacatgcgtaaagaatcaacatcataagcctgttaacaaggatgattaagctttaatcaattaaatgagtttgaaggaaagaaacatgtaacatgtttacacaatagtcacacataaagcaaaatccattgcttgattatatatttgcagaaacacgaaacaataaagatgtcaaaaatatttgcagcatcataccaacaacactttttagtggcattattttcgagtttttgacttttgacataaatatataataccttgtcaaagctcctacagaacatactgcagagcctggatatttgtttagaactaaatattcttatataacataagtaccactagcagatgaagtaccgattttactagtacataatacctgccggtttccttcagctttaatgagacttccattctcatgctgcttagcaatactggtggtcaaatatggcaccattatctcatctccttgagaaaaatttccattgattcccatgttatcaggctgtgttccaggaaataaaggctgaaaaggcacatgttgacttccagcattattttctaagataccttcccatgaggaaaagccaaggggttttgaggatttgtatgtcaatccagcattaagaatgtcttcgattttattgtcttgagtgagtgagatataattcaccccaggaatgacatgtaacttctcttgatcatctgtctcagtttcaataacacaattcatgttaggtacagactttcctgataagaaggccagtatgtatggaagatttataacaaggtatttgattttgatgcaatattagtgtaaagttttttacactatcatgcaatcatgcacagtcacatcatttaaaaaggtttgattcttaaaattagttcaaaaaatgagtgataatgtaaatttacagtgacaaactgacaatgcatcaaagttaaactgataagaacaatttaaaatgaagaaatttacttatgagcggctgaggagaataacaatcagcaggttgaggtgaaatcttctcaacagggcgttgtaactcgaggaaagaataaaactcagaacttgcatggttattgaatgctgtaaaattacagttaaaaaatttaaatacacacaagaaagtgatacaaagaacaaagtcaacaaaaaggctactcagaatgtcctctagatatgaaaaattgaaaacagaacattttaaattattaatgcgcacaaaagaaataccagattcagcttcttcatattctgatgtttgggcactgttcatgcttgtatcaatagtttgtgaaggaacctggtaactatgtggatgaagagtagatgataaagaagtgtccatctctgttttgggcataaatttatcagtttgttgagcataaggaagagattcttcattttctttagcacttgcaaaatttgccttggttccctgattattttgaacaagacaaatgagagaaaggaatgaaggcccaaatgaaattattcatagatgggaagatatagcaactcatgattatatttattacatagttcaaaaagttcactcctgatgagaatgttagcctttttttactttttaaggatcacagtacagagtcaaaatctgagaaagggggaaggagaattgtgcatactgcatagtcatagaaaggaatatgtcaccaatttatagcatcattcaagaaaacgtctggttttgaaacttatcagaccaagtattgattaaggaagcagtgccagttttgttatttttaggcagtatatattattagcatggaaagtctagttacatgatttgggggaataccatactcaagttaggatggaatttccatgttttactttcctactaaatatataattctacaacacaattacatattactagttcattgttctcttaattttactgggaatgtaaaagtaagcaattcttcttgagcttttgtcaaataacaattaggcaaaaaatactaataaaatcgtaacatgttaccttcacttgtcgataatggacgagaacaatgtgagagagttccctgcaacaatgttgaataaaaaaggtgagaagaggagcccattccacagataagaaccatagaaacaaattagcaatttctagaaggttattataattagtttaaaccaatagaatgtgatcaacgtttacagatatatctcagtagttctagtttaaagcacaccatcctcaagcaagaacaaacacataagaagaagagcccaggttttcttcattcctttctggatattactatatgtctgtgagaccgataatgagggaaggtagaaagttaggaggaggtgagagaagaagatagagcagaatcaggcaaatgaagatagaacattaaataaataggggattttttatactgaactgtgaaaatattaagcagaaacacttactcttcaagcaaccaatatgtgcgtctttgaaaattttcattttcttctccatgggcatagtagcaatgcaacacatccacgcttccagcctgagagcatcatatcatgaatcattcaatgcaacagtttataaagaagaaagattctctcaatacattttacttcccaaagcagaattaacattaatgatagtaaataaagcttacagcgacctttgcttctcattttatggtagatgtgattgtaccagtgcttaagacttataaccttacatgcagcatatttaccttcagtctctcgtgggcttctctgactgtttttccatcttttttcttcctccagttatggccatcctttctgaagtatctcagcaccttccgatcaaataagaaaagtgaaccacctaatgtcaaggaaaaatatgataagtgcatgtttggaaggatcttctaaagtcacgttgaaatatcagctaaagtaattttaggtaaatgctcatatatttggtctcacattgagaaactgattttcagcccagttttgattaagagtaaaatcaacctcaggtaacttttgcatgggataaaagatcataaactgagttctcttgttaacttgcttttagaataaaattatccaaatataaatcacttcactcagaattaattttaaccaaaatcaattttacaaccactcactaagacccctgagaatgaccattttgcaattagatattgggcataattgtgtcaagttttcatgcaggtcccagtcctcataagatacagatttttcgaatagattaaaatcctaatcctccccgtcctcccttcaaataaaagaaaataacaatatttaaatccttttctccaaatgaagctattgagaacttaagataactagtgttatctttttggcagaagagaaacaacatacttggtggcatatgtgcaggttctgaagcaattagaaacttcttgtgattactgaggattgcacaaatttcagccggacgtagccatctatgctgtgcttctaaaataatttgcttaatatctgtgtccatcaaagcatagaaattgaaaacaaagtcaaaaacaataaatacgtcgaaggaaatgttaaaacataaagagatggcatttcaatgcttcactatcatggttgcttttgaaaaaaggtttcttttttcagaatttgaattttgtgaatgtcaaatgatgagaaatgaaatatagagaggaattaaagtgaaggaaagctgacccaattgagaggggggaacgtagtgtctggcctcagccatggaagtgagaagctgaactgatcaatgtttttgtctcccgacaaaagaaaacaagtataactcgatatttatttttctgaggtttgaggtaaacgagcactttggaaaagtctgtgtttctaaatctaagcgaaactaaaaagagagatgggttgtgtgtcagatagtattttttaacgcggagagagagtgtaatgggtgctaagagggagatgaataggatgtaccaaataccaatgaacgaacaaagaaaagttttcaacgcgggaacttgtctgtgatagcattgttgtgttgtgttgtactatcaaagagaagaaaaagacattgaaagggttgtccaagtcaaagagcattgtgtgattccagtttgactgatatttggcttatccttcctttttcgtcgcagcttctcagatttttttggcctaaacccgggattatatgacgtcattttgatatgtgctaagaaaataaatatagggtcaattgtttagaggtggacatatgtaccaaaaaagaaattgtttagagatgaatattctaaatttaatgtttttttgattcatgctggattttctaaaatcacgttaatatactaattcttgtgattttatgtaaacttttacacttgttagggaataattttatgaccataattaattttgaattaaaataattctaaataatttttgcattacttaaaaatattgtatactaagtattattattaaattttttataataaaatatttaaatatgaatcatatttttataatgaaacataacttatatcatttcaaaatcaattttaataaaatcaatttaattcaaaattattttcttagatacgtttgaagccaatggatccacacatattataacttttgtgtcatttttttttcttccctttggcgtgaaaattaaaggtaaacaattcaaatagcaaagcaaacacacatcttatcgatacttgttcaaacacacataataataaatatattttatttgcataacttaaaaatcaatttgtcaattttttttaatttaaaaagtttgttataaaataataggttctatatccaattaggtacaagatttgacacaatatcatgtcggaaagagaaagataaaaaaaactattataatggtttttaggatttgcttcatgaaggaaaattcaaatctaattagccaagcataatttttttttatgccccattccttttcctttgttcggattattattaagtaaacataaagtcagtaaaatacaacagaaagacaccattaaattgtttgtgtgagacaccctcgactccccccgcataagggtggccatgattaaggaaatgaggagaaatccccatcttcaaagatcaaatatatacatgtggcgttagtattgcctgcaaatcatctatgttgattctactttgagaactatcttcatgaactcgtaaacaaaataactaatagcagctgacggcaacacctgaaaagtcaaaaattgaaaatatcatattaaatggactaagatgaaaagcaactctccaaacttcgtgaaacaaaaagaataaagaagtttcatacaagtccatcatatggatcttgggatgctttggaacaattcatccaatctacacatggttaatacatatatagtaaattagtaattcgtcaatcctcccttatcttgcaaatatgcactactttggatgccatggatagctctgaaaaattcataggttatcctccatagcaaggagaaaaacagttattttcttaaaaattgttggtaactatttcacagccatggttgtaaagcagcttctgtgcatgacataaatacacatcttcataagaattttatgttcaagtaagaaacttcatcgaaaccaaccattgtatgtgccttgcaattttgctaaatgcattgatttaaaaaaaaaaaaaaaatcattgactatggggcataaaactcaaattttatgaaatataagtttcactttatcaactatcatccactgttttacctgtttactgaaatttaaagaacggcttttattgatcaaagcatattattaagaacagaagcaatacctgcaataaactaggaattaatccaacatagagggcgggcacacctccttgctcaacaatcttgacacaagttgccagtgcattcaatcttgttgcccgaacttgcatttgaagctgtctccttacgacttcaaaggggtaagtagcggcttcagaacaacaacccgcaatagcaccatataataaggttctgacaggacccaattccagttgttctaatgcattcagctcttcaccctcttctttcatgtgttggattcttttcattccttcaggtgaatgcagatatgctgactttaaaatatcataaataccatagtagacagcacctgaaggtgccatgctgataatagaaggtactaaacccttgtaaagagaaaagaagccctctgttttgatcatgtggcggaaggcaccaatcacacctcccaacgcttcaccaccaggtgctaccattaccgtcctgatctgaaagaaatcaatcttagaatgcaagtacaacaaaattcaataaaaaaatgcactacactcaaatagtttgcttgagtaggctacacgatattcttgacaaggacttttttgtgcaatagaccatgaacactggtattcaaatacaaccttgagcatgttttttcccccttaatatgattcaagtttaagtttttgttatttaacaatgattacaccataaacaagaagcatcatggaggaacatattcatcaaaggtaagaatgcaggaattatgaccaaagatatgcttacaacttccaaagtttattaagcaaatgttaagagctctaaacaaccatagttggtcaccagataagagtgggactaagcatccagtgaactcatagaatcactttagaaagatgggtagataagaagagcagcaatcaatcctctttagttttgccaactagctagcataaagtacaccagttaaaagacattgaatttgaaatgtagcaagctacagcttcttgcaaattaaaactccttgggtaagtaggacctatgcgatcacatcaaatctgtctacaaacaccacactagacaaacctgcattaattcatacccatcatatcatacttctcagagcatcacagtccaaagaaagtttatctatacttgaacattaacaataaagttacacaagtcctatcctattgtattgcccctcagagcatcacatttcaaaacgtaaacactagagacaacagatgcaggtaacatgatcctgaatttccactcacagtgtccatgggcaagcagagcaaggtggctgtaatcccagccgcagcacccgcaacaaatctctcaaaattagtagattcttcattccccagcatccttgtcagcttattcctatacgtatcatatgcataaaaatttatagccttaaagggtgctgtccgaagaatattcacaaaattccctttccaaaaacctttcaacccttgagaagctgcaattgcctgaataagttcataaagattcttctgctcaccacgaactatgtactccagcttaagtctctctagaggcgcaacaaaagtcctgatacaccaaacagaataaagcaacatgacaaatttataccacattctccttctaaatttggtaaaaaaacttgagaacaaaaaacaagaataggtccaaagataaacttcagcaaattggcagtgtaaaagtaataaatattacagacactgacaatgtaaaagtcttgaatactgttgtcgaatcatagtcacaaatgtaatgtatagtaagtttattaatttttataataactacttgataagtcataccaataatgattttagattagttgacaatgtagattttacaatgagagtgcacagctaagtttattgactatcagtcaatcacgaatcttattgactcgtgcaataaccaccttaaaggccataccaactaagaaaagaataggtgcagtgatagaggagggaacttgagtgtagaaaaattgtgaagagtaagagtagtaattgttctgtaaaaagaaaaggaataattatgaagaccttgaaaccatggcagcaacagcaccagcccaaagatgtttggtcatattcatagcacccgatccattgagccccaccttgtctttctcttcttcttcacacaccttgttgtgatgctgccccagaatttcacccgattctgggcgatatatctgatccgcagcggttccgtttaaggagaaactcaacgacaagaaggcaccggggccaccagctatgccgcaaagtctctcttcgacattcaaccttcttttgggtctccaacaaaaacaagatactgtaaccgggtctgaaggaatgaaggaagcgaaggaagaaggaagtgtgtgagcgtagaggaagaggccaccggggaagaacgaatcggaggaggattccggttgtgtgattaagtggggcattgtaggtttcgttgtcgtcgttggtacgatgtagtaggagtgtttgaaaaggatcaaggtggctctcactcaagacaaaaacaacgtgaagaaggaatatttgagagcacaacaggatttttttaaaaattcttcattgatggtttttttttttttttttagagtgataatttttcttctttaaattttgggtaataggattttgcaactctcctttattatcagagctcaatagcctagcatggtagtataattttgatggtgcgagcgtggcaatgtcggtttctctcacgcgtacagtgacagcgtcacattcttgtgttttgggcggtgggcctaaaagtagcaaaaacccactctgtttgtttgttgtgggctttgtgggttgtgttgtgtacgcggcactccgactcatctgtcttgttattttcagtgttcttgtttaacatttagtttgaacttcctcgtgcgcattgaatagcctgatctgttggtcaaagatataatatataaattagtaattttctttgatgttaaaattatttgtagctgcttaagagtattatttctttctcatttatgatgagtgtaaaagtatttaagaattagctagatattgataatggtataattaaaaaatatctaaataaataaacaaaaatgaactttattaatggataaaaagaaccgagaaaagtaatatatatatatatatatatatatatatatatataaggcatgtattattcacatcgaagaaaacgaaacctgaaacaaaacacacgacgtattatatgttttctgtttattaattggaaaaaaaatacgattttctgttgtctaaagtctaaaataaagttttaacatgttcgatcaaacaaacatatataattttagtttctattctggaaaagtattgtcgtattcttatccaaggcgtttgacatcttggcatttttcaatatgtttttttttttttagttgtgaaatacttggcttatctttctcacgacacgcacataattaggctttcacctgctggaatagccacctcctggtcgtgactcgtggtgctctcattcagaatatagtttgttggtgtctctttccttcatacggttgtcacgtagctttctttttttattgggtatagtgccccttcacgtaaccaaggcacaaaatatttaattaagaagatatgtaatataaatctcaattcaattttaaacaagtttttttggggtacatattttaaaacaagttattttggtggtaaacaacttttagttatatttaaatgacacccgtacctctttgcctatcttattatatatacaaaaacacattaatcttttgtatctaaaaagacaaatgcctcttgttgaaaatttttgtttttaatctttcgaataatataactaaattaacattctaactaacaaattaacgtttgttcgtaaaaagacaaatctttcgaacaatctaactatagaccaaacaagtgttggaaatgcctaagtcgtttatctaagcataaacgtatattttgacaacttttatgaacgtttttcattccttgtatactgttccattttattttatttttataatgagatccacaagtattcaccaataagacataacttatgattaatgaaaaatcatgatatctgatatagttatgagaaaattggtccacatctaaaattgggtggttctttaggtgagttgttactctaatcgcaatcgccatagaatataaaggaatgcaattaaaaaggcagtgacacttacaaagacttcaaggctgatgtgtccaccaaataataatataatactgatgaacatatattcctttggattatcccctcatgcatattgttgtcaacacatgatgtctacatatatcttccaactcccaataattaaagttaaaacatggatctatgttgactatgaatttatcactaaacatactataagtgaccttaaatttcatctcactagccgaaacggaaaacaaattactattttttcaatttctttatcaagcctttttcttggtttaggaccactttttcaggatactgttttagtttttcttttaaatcaacaaacctttcttttaatccatccaaacataataatagtagacttgtcattaaagaaaagtgttgtactattaaaagctccactcaattaataatctttacatctcaaatagattagtttctagttgttaatttaagcattttagaaaaaagttcttaattttaagaataatcttatttttttaaaaaggaattttaccaaaataacatgatcctatattaatttcttaaaacatacaataatattttatattaatatacttaagaagttaagttttatgagtgattatatcagctcaggtccaatcaagttgagaaaatcaaaacctaagatccttatccatcgagattgagttagtttaggttaaataaaaatcaattttcaatgctggacagaccatattttatagaatggttcggtcagtagtcaagttggtcgggcctttgagtcaaacaagatccctaaaaaccaggcaattctgctttggataggacgatgggtgccaccaagagaaaagggctagatggagggtggtataacataaacctaagaggaacaatttgtagagcttgtttattacctgtattcttacatcaagggactaattgtattacaaataaaagaaataactatcaatatttgtgtcgtacatcaaaaccattactgcaatttgtccccctcacccaaaaactgaagggtcatggatacgaaagcacttttccttcagctccatcattccatttaagcagccaatcccagaattttatcagtgaacaaattattgtctatttcgagaatagtcttctctagcatgagcaacctcctccttgttgctctgtctgggatgaattcaccgtgggttttaaatttacatcgaccatgtcttcctgctttgtagaagaaagagtttccatccctggtaaggcagcagcaatcttacgaaacaaaggctgcaatttggattgacagaaagcattaagtacacaagagccaacatgtgaaggaagatgaagttgaaaaccacaatagtagatcatcaatttgaaaatatgatatatcatggtcacgtgcatcatagttcaggagattgctctaataaactaaaaatattgagatgaatgcagaattcactaattttcaccttgatattgaagcctgcttttgcactggtttctatgaacatgattccgaactcacgggactttgcatctccttcctctatagaaacttgcctgtttaagtatcaaaatggccttgtaagaaaaacttcagagagtaaaatcacaatatgcgaataacaaacacaaagggcaagccgcttggtaaacgaatttctgctctttgtaactactaatgcatgcaaagctaatgccttgagatgaattttaagccatcttaaaactatatttagtctaccagaattttacagttttcggatgaaacagaacatgtaaacactaaaatagaaggatcaaaacataatatggaaaccccattatgataataaaaaacactaaaacatccgcttaacagttaagaatttaacttttctgtatattaaacaatcatataaaccaaattagtacttacctcttatctacaagatcagttttgtttccaaccaacacaatgataacatcactgccacgttctgtacgaacctcctcaacccacttgttagtgttcagaaatgattgcctgtctgcataagaacagcttacccaggttaaataattataaatttcagttaattttgattagttgtgaaaaatgagaactaaagcacttccaaatacacatgcaaaaacagttaagataaaaataaaacataagagaacaggcacgaatgcaagcaagcacacacacaaatagggagggagatgaatgtaataacataatgtgtcttagaaaataagatcagaacagtcactcacacataagtattaaagaacacattcatgcactacaaaacccttttttgagttacatggtcaaataatttggtcatgagaaaattgataaagatccagataaatcatgttaattagataatgaaagtggtatataaaagaacttataaaactcactagcaacatcatatactataactgcaacagaagaatctcttatgtagcttggaatgagacttctaaatctttcttgccctgcagtatccctgtgaagttaacatatactaagctcagaaattgtaaggataaagagtgcctataaggcgtaccagcaatgtgcactctaatataattgttgaaaaataaataaatataaatagactgagcttgtatatatgatttgaagaggagtcatcctaccaaagctgcaggcgaacagttctatcttcaaggtacattgtttttgacaaaaagtcaataccaatagttgcctgaaatttacataaatttttttttgtaagcagtctagcagcaggaagaataaaaattgtgaatcgttgatggaataaaaaaataaaccaagaaaacaagattccatgtccattttaagtaattttatatgatggctaatataaacaagacaataatgatattcatagaccttcatacacacacctacaaagtgcttccgcttcatttttctctctatttctctctttctttcaggtcacatatttcttctctcttcaatttccaaacttttactaggtgtatacacccatggagtgtatacataccaatcatttccctaaacaagaagcattacaagcactcagaaatctaataaaacaagcctcttaaaaaccaacacaatgtggatcttgagtgaagcccttctcaatgactaaaattcttcccattctagcatttcaccaactcaaaccatgaatgctgatcccataattgataatgtcacaaagagttttcaaacaagcggttttatttctagctaccactttagcattcccctaaaaaattgagggataagtttcaacacaagaaaaaactcatccctcaatttttttatccgatagacacaaaattcagagcaaaagtatatgacatagcacatttttctactcctcttgatcctcccaagtcctaattatcgttgatcaaaacgtcttaacaaattcaaattacatcaaaacttatcgtggaactcatttcccaaataaagtcaccaattaaaatgatatatatatatatatatatatatcatgccgtcatcacagattgattcacgtgagggaaagcacatgcataaataaaacgcatgtcgtaaatagagatcaacggcaaatgaaaacgaaattgaaaatgagattgagattgagaatgaatgtgacctggtaggtggtgtcgaatttgtcgtacatgaagcgggtgatgatgctggttttgccaacggattgatcgcccaagaaaacgagcttgtatttggcgagaggggacaccgtcgccatttctcacttttttctcctctcacagacacccaacccaacgcagatctgaatctcccaaattctcttctcgcaacaaaattcagaagaaaagagagagagagagagagagagagagagagagacagaaagagaggatgaccaaatttaacgtaatgtcgagtgcaatgcgttttatatatacgggataccacgataccgcgtcatgccaactttctaatttgtaccatgcacctatttattttaattttctcccactcctctgttatgtcaattaattgtcatatatatcatatatgtatcctccctccaaaaccaagacgaattagtctaattgtattcgagaatactctatttaacaaaagttgattcaattgaaaagagtttaatgatgataaattgataatataaaataattttgtattattctttaattataaaatcattattaatataattttaaaataattttataaaacttatcataaattataatttttaattgaataatagtgtaatattagtacatacctatctttctcataaaaaaccctcatgtttagatagaagagcattatttttataatactaatattttatataaacattttattttttgttacacaaaatttaaattatagaatgaccccaatccaacaaagaaagcttcggagttcaaagaactaaaaaatgtgagatacagtcatgtcaaaatcacatcataagattaaaaatagtcaaataatgttaactaagacaaatttgaatcaattaaactgttcccataaccattaggcaaaagtcacaatcaacacttatattcatcagtaaattctagttctcgtgaataaatttgaatcaattaaactgttcccaacaatccaataaccattgaaacgttaaaggggaaatgaaagtggcttcacaacctccaaactctaaaccaccccctccaaatttctccaccagtaaagaaacacaatcaacagcatcaccacaacaagaacccaacagaaccattatgtggtggtgtatatatgttcttcctcttcatttggttggcctagttaccaacactggccggccacacgatccttgccaacaaaaccatttatgatagacattctggtcatatcaatttgggttccttctttgtaggattctgataaagtgcgattggttatgttggattggtcaaaaacctcgagccttaaattgatgatccttgccttgcaaaccaaggcaaccatgtcagacaccatgcggtctcttaggccacgtaggacttttgcactgtgagtgcactttgtctcttcatgcagttgcaaaaggtcgaataagaggttggcgatctcttccatttcaaccttgattgcttcaacttcttggaagaactgtgagaggttatggtaatccgtggggttgtcgagtttccctgcttcaatgtcacgagagtcttcaagatcgtccttctcagcctgtttcttcagttcagcgtagctttggaacgattttcatcaaatcattcatctttgcaaaattctgcatgcagaaccaacaaaaccgtgaatgaatggaatgagaacacaaggaattattgtggtctatggtcttggtcaacttctacctaacacttaaccaaggttttcaattcaatttacacaagaaatagctaataaaatttggttacatgaaaattggttgggatcatggaaatgtggttctggaccatagaataatttttcatgagaacttttgagatataaagcgagaaagtggaatacttgtgggttttcaggggaagaaaatgaagcattgaagcacacccttttggataatgagttaatttctcattggacgcaagtttttgtcatgaaacaatactcccaagtgatcaatggaacatatataagacaggcaacgacgataaaaggaagacaagagaagcactatgttcaaagcataaaagaaaaggaaaaaacaaaaatgtaaagaatggaatgttgaaaatggattcttttattcttccacccacagaaaatttcgagagattttacactattgaacaaagaaatataaaacctgaaaagttattgtgcagttttaaagtgttaaaacttttaaaaataggaaacgtgaatgagtgaagaagagaatagtgtgatactgtgattgaaccttgaggaaagcaatttggtcactttttcttgagtgctaatgatccctcaatgaaaagcagcaaacgttacaaagctaaaactagagcttaaagaaattaaccaaaaactagagaaagatataaaaaggaaataaagactaaattaatattcaaatatttgttcatttatttcttaattttttaaaggtagaatatattttgtataatcttaattgatactaattatacatattattcatgtatcaacattacatttatatatatatatatatatatattacttcaattcaaaaatttatcttatatttttattctctataattttatcctctgaaccaaaggcatcttaattgaatcatattgtgtgtgtacactactacaacataggcattcaaggtcagttatttggatcatataaagtcgatttccgaaccaaccttgtcttagatgactttaaatatgtaagcgaacaacgtcgattttttaaggatcgactttgaaaattttttattttttattttttaaaaaaaatcatcttttctaagtcggttatttcaaaaaaccgacttagaaagctgagatacaaagtcggttatttgaaaaaactgactttgtatcttagttttctaagttgattgttttaaataaccgactttgaatttcaaattgaaaatctgggtgagtttcaaattggcgctgagcgagaatgactgagggagaagctgagaagggagaagcctctacaaagtcggttactataataaccgactttgaaaatcttgaaaacgacaacggtcgtacgtggaaatcgacattgaatggatacacaagttaattttttttaaaaaaaaatatgttaatctttcaaagtcggttattatagaaaccaactttgtagaggcttatacaacgacggtcaacaaaaaaccgacgtcgaaatgccaaatcaattgaattatttacaaaattaccactgacctacctaccacgtcggttttcttacaaccgacttagaagacacgacgttaaaagtggcttctactgatataaaggaagaccagcttaattgataatttgataacaagtcactgaatttcaaatcataaaatctatactcaattcagtttcgataactgaaatgattgggtcctgttggtttaattttatttttttggaatacttatataattgcatattgtctaattttttttaaaggctaatgaaaattttagtaactggtctagatggaacacaaggtgtgcccataatgaccaaatcaacctttagttgttttgaaaatgtgtaaactatttaaaataatattctactatacatgcataaacgatatccaacatgacccagtcatctcattaatctggtctaatccgaaactgattatacaggttcaagttttacaattagacttgatgcattttgagaagaattgaaattatacttcgagtcatctcaactcagtttagtgttttatagttttttgtaaaatataagttcttcgaaaaattatatattaataataaaacttggattgaattgcacttttgattctcaaagtattgtaattatatgactttgataatccatattttaattgtgcaaattagaacctttaggtaccaatatgatatgacattgttagtatataacattttttcttaaatatatgattatgaatttgatctctaactcatatataaataaaaataagttcaatacttaaatgaatctttgagggactagtcgttggtttttggacaactaaattgtagtttgacaacacactggtgcaacttaatttaatttcttatccctcctgtttgctagctagtaaagccctttacaagcaagtatttataaatgatcagagatcgagtttccaggaggtgagaataaattattaacgaatttaaatctacagatttcaaaatagatgaaattctgtagccttttttttatagataagcctctctatttttgtaataactgattttctctaatccagaagcttgaatatctcatatgtttgtgtttctcatttcaacgaaatggcttttgattcagaaaacatactttcgcaactgtgcactatgtaaagaattttatactcatcactaaattacgattttatgtacgttatattttccaaaaaaaaaaaaaaatcatgtgaaagaattttcgagttgccataaatgccaaatagatgtacaatgcctataagccacaagtcgccaaatcggtcacactatgtaaggttgaagggggacaaataatggcccagatccttcttaataatcaaagatagatttgacaatgattttgacccccaaataaaataggtaaaaatgattggaagggtgggggtagaagaaaggagatagatgtcctataatttttttttctgcaataatataaactatttttaatacttttaaaattaatatttgatcttaaaattaaaatctactttatacatggtcatggtgggagtaaaaatacaatgaaatgtaaacctaataaaaaaattataataagactccgggtacccaaatttataatacaagaaatagatttttttattaaagagaaaattcaaataaaataaagcgacgttaacaaaaccatgcaccgtatatatgcatatttggcctcaaacattcacacggttattatttctacacaacaacagaatgttattaaagttgataacctataataaggaaagaaacaagtcaccaaccgtcttaactacagccctacactgaccacagaatcaatttctagcattaaatttagacaacatcgcgggtcttataccattgtccctttgcatcatttagtcatcaaaatggagtgtctactctatcccaagtttactgtaattagctaaactatcaccatgaaatcccttcaagtagggcaagcacaacaagactccaatggaagtgagaaggtttcagacaaaagcatcgtagttcccaacaaattcatcgcaatagctgatagcttcaaaggagaacattcatggtacttctagaataggatctttttatagattaggcagctaaaaattcagtaataataacaatatctacatgtctaaatgaatttgaatttgcatgtctaaccaagtatggtaatggtactccccccacccctcttattttctcttcctggtttccatttttaactaaattctacctaccacttatgtgtatgtgttttctttttcttctttttgtttcttttctgatttggtcctgtgcaggttcattgctcctcaaatcccaacagacttttcaattcaagtccaggaaaccacttataatgttcacaaggtatagacaaactcttttgacatatttaaagccttgtaaatgtagaaaatcacccgatgaattggtttattaacatatttccaaacaatcatcagcggggtatatatagagcacaggaaatcgataacatcataagtcataacactgtctttttaccatactcttatctcaatgagtgacactgactggtgtagaacatagttttatcacagggagcataagaaccgcacattccttttctttgtggtatgtgtacttgctttttacctttttggatagggtaaaaaaaattactcgagatagaaagcacaaaactttagagaaggtttaagagtcctgaaaacagaacagcagaaaacatggggaaactaacggggtatttcattttttttaatatcattttcaatttatatgtttcactgataattataaaaaaaaatgtagcattattttttttcccttgtttttaagatttcatgggggaaatagtgaaaatgacaaagcattgcttctactatttccttaaacaaaatctaaaaacaagaaatataaagaaaataacgtttaatttttgtaataaaaataaaagaaaccgaacagaccagcaactcatgtcttaatcattttgtacgatagcgcttttgctgtaacatcattacgtacgttggtcacttttttttttgtaacaacagtaccccttgatatcaaagtgcggttacataggacaattggaaattcagcctttgatctcaaattctggcagtgtgctcaagcttgaaaacttcccaggtggatctgaaacatttgaaacaattctaaagttctgttatggcctccctatagacttcagcccagataacatagctgcactaagatgtgcatcagagttcctagagatgactgaagaactagaagatggaaatctcatttctaagagtgaagctttcctcacctttgttgtgctttcttcgtggaaagacactatcactgttctgaaatcttgtgaaaacctatctccgtgggctgaaaacctccaaattgtaagaagatgctgtgattccattgcatggaaagcttctaaagatgagctcacaagcgaggatgcgacacctaatcaagaaagctggtggttcaatgatgtggcagccttccgcattgatcattttatgcggatcatttctgcaataagttcaaagggaaccaaaccagagatcattggtaaatgtatcatgcaaaatgccaagagatggctgccaggaatggaggtggagttagaagggtttagaggatatgggcatgaaaagtgtaacctacagttcagtatttttagtgggaagaagaaagaaagcagtggacacagcaaggagcaaaagacaattattgaaagcctaataagcattattcctcctcagcaagatgcagtctcatgtaagttcatgttgcagatgttaaagttggccatgatgtattcagtatcaccagctctcacaacagaccttgaaaagagagtgagtttggtgttggaagatgctgaggtgagtgatcttctaattccaagatatcaaaatggagatcaaggaaaaacggtcatgtgagtatgtgacaattctccttttttttcacacattggaattggcattaatgccaaaggtcaaatttaactccacagccctctaaaccatttttttttaaaagaacccaagagttatgaaaacgactaatgacactaatatctatcttttgtctttttctattcttttccctcattagtagcatgactaattcatctgaagaatgcaccatgctagacgtagatgtagtgcaacgaattgtggaatacttcttgatgcacgaacaacagcagattcaacagcaacagaagactaggaaattcaatattagtagactcttggacaattagctgaaattgcaagagatccaaatctttcaataaccaagttccaagtttttgctgaattgctaccagaaaatactcgatcatatgatgatggcctatatagagccattgacacctacctcaaggtcatcatttaaagtcttattttcttgtgattcagtttcccgttttaactaaaggcaaataaaacaaagttttgacattctgatattgacatctctccagacccatgcttcactgaccgagcatgaccgtaaaagactgtgcaaaatcatgaactgtgaaaaactctcacttgatgcatgcctgcatgctgcacaaaatgagagattgcccctaagaactgttgtccaggtaaagtttgcaatctctggaatcaaactttttaagcttcatacatgataaattaacaaatgaccatgaacaacagttttgagaatttcggattccaccaacaaaaaagcaaaacttgatgtgatggttatatagcagaattcacaattcagatttagcagcatctgttctacaaacacagtagtcatgttaaatattagaaccaatttaggataaattatattattcattatattaataagagtaaattacactctcacctcctatgttttttttgttttgcaccttacaaaaaaatccttaattgtttaactcacattacacccagacctcctttttcctaaataccgtttaataatttaacagaaagtagatacatgttagtcacatgacttttaatgaaaatttatgtctaaaatacccttatcttcctcaaaatcacatcttgggttttacaaactctcttcttcttcaacaacccatcttcacttaccaccaccagtccaccaccacctccttctcccacagcagcatcatctcttccttctcatcgtcgttctcgcccaccaacacgacgtccaggcgcgcacccactcccgccggagcaacaaccactactgtagtcacctcctccaccatagcaaccgtcaccaccgtagtcgccgccgctaccgtcatatctacctccaccttcacgtcccctgtcgtaattttggccactatcaccgctgcatctggttccctggacattggtgccgtcgggtaaaagtaatgtataaaaggaaggatatcgggtgcaatatgagaaaaacacaagggatgcgagtgtaatttactataacggacaatttcgtctactcagatatttcaattgacgttagttaaggacgttaacaaaatggagtaaaagtaatgtataaaaagggagggatattgggtgcaatttgagaaaaacacaggaggtgtgagtgtaatttattctattaataattgtaacttcacaaactttttacttttacattcaataggaaaaccttaaatactaacagaatctaaagttgaatggaaattttttaacataagtaggataataataatcctcctcataagcagaaaaatgaaaacaaaacagaaatactccccaaatcaatccctccctgaagccacatgctaaaggagaggccagaaaaacaatcctatcccaatggaaaatagttgacagtaaactctacaaattatttcctctatacacaaaggatttttttttatgacaaagattgtgttttactaacctatagtgattgaaaaaaaaattctcttaaaattgcagtaaaacataattggttagaagagagaagtttaaagaccagaaatgttgagatatgacaatcatcatgtgaggagattcaacagaaagaatcaagtattttccaagtccacttttaatatgaaaattgaattctacagaacagtgttgaggaactggttcacataatatacaccccatgtaagatagtgaggtagcacaagaaattatagttaaaattacatagcatttttagagttaacgactagagtgatgatttggcataaaagctgccaactgaaatcctgaatgaaagtatacacaacatgcaggttctattttcagagcaagtaaagatgaggacagcaatgcatgagaaagagccagcacaaattggaatccaatctgaacaagaaggaaaccatacatctgcaactatggacattaaggcactcaaagaagaacttgagaatgtaaagtcccaaatggtagaactgcagaaagactattgtgaattacaacaggagtatgaaaaggtaagcaaggtaagcaacaagccaaataattcatcaggctggagtttaaattggcagaagattaagaactccttacatacaaaaccagcaggagttgaaattggagacagacaggatgcacccaagtcaccaaacaccattctacgtagactaaaccctagaagaaggctctccatgtcttaaaagtattttatttttcaagtttcaacataaaaagtcctgtagtaaaaacacctagctagccattctttatatgaagcatatagactaaattttgtatcttaagatattgttgacttcaaagagaaaagtttctagtaggctgtagcttcctatagagacaaagactctgaaataaagcaatacaagtatactgtatacatacctgaaaagaaaacgaaaatgtgactagattactgatacaagctcatggcccctaagaaagtacagttgataggacatcaactaataacttataagtttagcaatgaagcataaaagatgcacatgaggggaaaacaaaatgctctagcattgcagaaaaatgcaacttgagaggaaacaatatctgagttcaaattaaaggaaatatgctgctaatttatagaattcacaatcaaattttactttaggatgtttgcttatgctggtttggcgattaacatgttccttctatcagcgaattacttggtcatttcaagataaagattcttggaatcatagtcatactgtttatagtgacaagatttttatgtttatggtaagcactaaataacaaaactgcacctagcctacaaacttccaaactcaaattctgggttttacattattattactattcatacatgggtaaaatgaattatatgaattcaaattaattttttaagataaataagttaatttatcatttcgaatataaagggttgagacttgacacaatgcatagagaagagtttataatcgaagagcaaatggtctcacttcctagaacaagcacagagtgctgcagaactactgagataaatttatgtcaacagtcaatttagctaaaatatcattccctatgagcatttccaaacagtagaactatttctttctcaaactgagcatggttttatttgattctgttgtgtgtgtttcaccatcaagttagtcccaatatatcaaaagttcaaaaaaaaaaaatcatcatttgattttgaattgtggtcactgttgtgatttcattgcaaaccttgatattgcagccaaaattacagacccttttttaatccttatatagcacaatcgccatcaatcgataaactccaataaaccactttaacatccaatgttttttatgccgaaatggaaccaaaaaaaaaaaaaaaaagagtgaacataacaattgacaagagaatactcaaccccccaaaactacacacctagcagtgagtggtcaacatcttctctttcttcttgtcttctacggtggaacgaaagtgctaagggtcctgagagaacgaaagtggtttcttgagggtgacgtaagccttcttgtaatcgggttttgcgaccaacgatcccgcgtaacgcttcttcttgcccttcatgttcaaagttcgcaccttttcgacctccaagccgtagaaggtttctatgaagagtttgatttcgactttggaagctgaaggagaagtcttaaacgcgatttctttgatgacgtttgaggaagtgctgggcatcagtggcatcatgggaaggtttgtgatgtgtgccattgattttgatttgaacagtgaacacttctttgaagacaacttttctcctctccgtccgcgcttccttaaaccctaccaacgaccaaaaccctcttcctctgcccctgtacctatcaatgccgccacctgtttttgtctctctctttgttttgttttgtttttcttaaatttgtatgagtatagagaagaaattaaagaataaaaatatttgtattaccgcaaaaaactatttttataagcttactttatttggataatatatttctattttttaaaatttaaatccgcactctcatcaaacatttaaaagtcaattataggataatttctaatttataggtttgctatgtgtttaccaactttttctattactgtttttggttgaaagctaatttactatctttaggataattcataaatgatggaaagagtaaaattagtacaaagaaatgctgttaatataaaaagatttatactatcaaccaattaaaaatcaaagttaacatgacttttaaaaaaattacgagtgaaataacacgtgccatgaatatatattaaatttagactttacaattttttatattattgtatttttcaatgtattttttcagtttttttagtttttatctaaatataagtaaggatatatatatatatatatatataaatatgaaaaaactatatatatcattttaaattcatttgttttaaaaaaaaatctttataaatacattcatattttgtatataactagatatatgcataattttaataagagatgttcataatgaaaaaataaatagattatattttgtaattattatttttaaaaaaaatatttccataaaaaagactaacattaatgaatacaaagataagaaaagccctcataataattttgttaattaatgaaaattatttaattctacaaaatttatatagaaagttgaaataagtgggaaaaaaaacatcacttatattattcacttacatattgtaccaaaaaatattattcatttacatataatttagtagtatcttttataattgattttagaaattagataaaaatgacttgtatttttataaatttttattggtaataaatagatgtgtattaattttctttcttttcattccttttttaattttgtagtgattgaccctgaaggtgggatatggaagacatgtttcagtttgtttgcaatgttttgatgtcaagttattcaaaacgtgaggtccctaaagatgcaaaagctattttcagctcattagtcattagtaatcggaatgcagtgtctctctttaatgtgatgagaattgaattgatgtcgtgtgtatccaatgatgttacagttatggcctttctcatgttcttgaataacaacatatggtcctattcagtaaaagaaaaaattatcataatgcttcagttcatcagagataaaggattaaacgacaataaataaatatttttctgagtgaatttcattggtgatcattgtcttctacgatataaatttcaaattgaaaacctgtaatccacacaacaattgatcatttaaagattccagagtattaaaaaaaaaaaaaagaagaagctctgtataacaacctaattctattgagatccagaagacatcgaaaagaatgcttgccttctatgttctatcatttacaatatgctaatatattttggataagaaaacaaagtagtttcagggggaacgaatgaaataaattccccatggtcagattctatgactccttcttcttaacctggtaggggtatttctggtatattgaaatgctagtgaccactagtggaagagccacaaggcaatacaatgaaggtggttttccatcgaaaataaactgtagcaatgctgtaatgagtaaagcagaaacattgacaaacccctgcaaacacatagaatgaatgacactgtaagtacattcgtacaaaacagaaaatgtgaagaatttttaatcctaatattccctatgaaagaattttcatcatgtccagcaactccaaagttactcaaaagtaccaaaagtttgtgcagttactgtctctactgagcactgataaggtgcaataataattttctcttaatcaacattaataatgcatgttagaatttagattaaatcccccaaaaaccatgaaaaaacaaatgcatgtaatatgtttcatcccattaacctccagattattacgtgaggtagggaaattgtaaactagcaataaggacagactaacatctgatcaccattcaccattttatctgtcatctgaggaaagggcattctaaaagtaattcagtaatggttcacaaagttaaacttacctttcgaacaccaccagcatggcttgtaactaaaccaacaagaattccaccaagggcattgaaaattactgggatctgaattgaataaaaaaaaaaaaaaaagatttgaaattaaaagttaatgtacatcaatatctattcattaacggcaaaatcactcttgcatatggataaaaacggccagaacaaggcactaaaaagttcatattatgaatttgcaagtaattatactcacaactctctattgcagttaattacaaatttagcatcaactagaatgtacggaattaatcaaacccccattcccaacaaaataaataaataaatgttaacaatcctgattcctgacatgaaaaagtatatgtccaaatttacttgtgcttgacacagaggtcagaatatcaaaatttgaacctttcaattttatagagtttactatctttttagtccttaaactttttataatttttgtttatagtccccgaacttttttatctgtttttagtccttcaacttttttatcatctttactttaagttccttaactttttcctcctccttacttttagtcccttaaggctttgtttgggagttaggagtggaagggaaggaaagagattcaaggggaagggaggggaaggaaagagaggaaaatgagggaagttccttactccttgtttgagagttaaaaatatattaagagaggaaaatagagagttaataagatatttttacaattttgtccttatttcaaaaattaatacactctatatcttacactgactagggtaggataataattttattaacattgattggggtaaaatagtaattttagttacttttccttctaaaaacctccaaataggggggacaacaatttttaggctttggaggatttcagaggagttttaaaaatcctcaaatcttttccctcaaaaattaaaactcccaaacaaggagatgtctctacataaacctttcccttccctcccttcccctccaaaatccctctcccaaacaaagcctaaaaggattaaaagtaaggcagaaaaaaaaagtttaggaactaatagtaaggattgaaataaagtccaaggacaaaaaacataacaaaaagttcagggattaaaaatataaattctaaaaagtttagggactaaaattatagtttacccttttatatatctgtgttggctgcatgacaacatatctaacagttctaagaattgtatcacacaagtcaaacagcagtaagaacattaccaaagtaagaggagtccaaccatagaaaaacccatgttgtctcatagcttctccatctggggatttcaaagtactggcaagcaaacatagacttccaacaatagacatttctatagtcatcaagtatgatgagtgtttcttaacctgtgatagaaggaatcaatagataaataataatatcaatcaatcaaggaattataatattgaagagaaaattgaaagttctggtaacctgtgaggcccactgacacaaggatgaagccagtccagagagcactgaagcaactaatacaggaataattccatagaataaaatttgatcagcattggcactagcagaacctttgctagagccttcgccaacacttaaaagaactgccgcaactattaacaagaacaaggctccaatttgctcaatcgattgtttttgcctgcacaaaccattatcagatgcctagtgtacagtgttagcattataggttagagaaggaaaaccaatactggtggctaacagttgatgaaagtatgattatggatgtaatctgttacaaacccctaacccaatattcctatttatgctaataattaggtcaagtactattagtactagtataagactaataaccttataacaataatttattatcactccccctcaagctagccttataacactaagctttagtttgttaaagtagcagaacaaaacacatataaacacaatccattttaaccaaagctaccaccaagaacaaaaagaaacccagcaaaataaaagacgttggaccatccaaacacaggaaagaaaagaaaaaaagctgaacccaaacaaagcataaagaattaatcagaaatctatccagtaagagaagaagagaagaaaagcctctcagaagagtctcccaataatcaccctctgaaactgttgcagaagcacccaaacaacagaacaagaaatcaacattatccaaaacacctaaaagtaaaaacagtgagtgaactacaccaaacctaacaaaatattgtttgaagattccggaaaacaccaagtgcatgtcaatgacctacccccaaatcacaaactgcaagaatataagtaggttcaaagaaaacaacctactcaaccccaaaattataacttggccagccaaaatcacaagaaactgggacaattcctgctcctcagaatagattacttttagttttgagtttttttaaacagaaacaacagctcttgagtgaaaccatttgcttaacatagataacaatttggcatatcctctttcacaaacgttaacgaatgggtttgtcaaaaatagcagaaatactaattgttgtcattgttgcaacatacctcaatatgaaatatgtaaagaatgcagtgaaaaatatttttgtctgattcagcattgagaatgtgagtgaatcaagattcttgaaagaaatttgcagcaaactattttgcaatgcatatatagctgcaggaagtcctgatgcagtcaacgcaccaaccaaagtccactctttatacactttcctcagactaccatctttagccatgaaaaacactgcacaaataacctaaaaggcagattacagagatagatgaaagatcccaataaagaataagaaaagtacgctatagtacaggttttataattaggcatgccaaaacagttcaagatttacctttgcaagttcacatgtcaaaacagatgaagtcacaataacttcacgtctgcaggaagagggggaaatagattataagacacgcttcacatggtcatttacaattattatatcaatttatggtttaatgcacaaggaaatgaaagacttaaaagatgttacaatttaaaatccactaatcacatgaacatatttactttaaccttagttaaaagaggaagcagatgtttcataatgattatcatacaatacaatattggagttaacatcatatccatgttggatacacagtcagatatgtcagcctggatatgcaatttcttttttcatttcaattttttgtgccaatatggatgaaatgggatgtaataagaataggatacaagatagtggataatgagttaatcaataatgctgacttttgaaacatttgtgcctttttaattttgattttgtccttcaataagaataactatgcataaatgcttacattttaaattgaagtgcttgtgttatagtatatgttttagtgttaattgtcaattttgcatgttatatacacacacacttttttcctgaatctctacttaggaaaactgaaggaacacttgctggtactggaaccatgcacaaggacaaagaagtaaatcgaaatcttaaaaaatagatggcaaaacagccaacttagttctcataaaatcaattctaagctaaatgcatatgaccaaaataggaaagggctatgctcaaaacatcaccatgtacaggttgtgctatttagagtaagaataactgcatggataatcctacagatatttgtaacattatcagaaactaaaataatgaataaggatggatttagctcctctaatgtgaggaaagtacactttagaggataagtgcagttatagccgttacgtagaaaacagcagttaagaattttaacaacttcataatgctatatatgtgtatttatttcatcacaatctcaaccatttattttcatatcaaggattgtagctgcattttatccaacaaggacaccagtcacttaaactgatcttgatctgaattcccactttccgagcatgtctatcttgaattgtgtgtgtgtgtgtgtgtgtgtgtgtgacatgcaaaacatggtgaaaataatgcagctaaatctaaatgaatttctagaatccctgcttcctgacaaagccatgcaccattcctaagtaggccttcaaattccatatgtctaagaatcaatacaaatgacttattcctttttactttatatttgatcaagtggatttcttctactgcttagagactcttgttctgttcctttgttttaatttttttttcttgtgggattgcataccatccacagtgccaccattgccaactttgatatagttaaaatatttagcgtagcttgttcaattatgtcaatctcgtgatactaaaccaccaagtaatactactaaccaatcttactgcaaaaatcacagcatagatcaaacggaaaataattaatcctgctaacgataattaaaatagcgaatattttctatgcttaataaaaaaaaatgataaatcccaggtccaggactttttattttactctaaaaaatataaaaaaatggttgggcagtaaccaacggtaactacaattaaaatttacaaccgtatcgtgaatcgagaagaaaagtatagaactgaaaccgtgaaggttgaaaaatgaaaacctgatgaagcgttgggagatcaaaggttgagctccgtattggagagcgaggagaatggaaaagaagcgaatccttgcattattcatcccctgaccctgagatggtcgcggtggcgccattcagggctttgattctgattcctccgatttcgattctccgatttgacggtgaatgaatatagaacacaactagatacccactccatgtaacggccgcaaagaaaacgacgactcaagtcatacgtacttgccacgcgtgctatgaaacgacatcgttgcctttttcaggagaggaacaaattgagcatgtttgatatttaatatttttgctttttggtgtgcaatctgaataaaccatgaattaaaacaaaaaaaaaaaaaaaacagctttacagatttaattaccatcatggtacgtttggtatgaaaaaaagttttttgataccaaagaaacataatttctgaaaaagtcgattctttgaaatatgtataaatatgtttgattcgttttagcgtgtttcttgagaatttgatactaatataaaatttgataattaatttttttttcttcactcgaaaaagttaaatgtctaaccccttttttagaatgtttttttatcaaaaaagtgaactaaaatatattctcaagagtcataattttcttttaagattcttaagaaagtaaaaactttttatctactaaatattccttcaagataacatatctacattgtgaataatataattatgaaatttatttattttttcttatatattagagttgatggtgaatcaaatttgaattatgtgcatcatatcaaagaagtatatttctataatattaatatttatccatttatttatgattgtataaattctattaagtgataaagcatttattatttctctaaataataataattaattaatctaatatatatataatacttataattgtttatctattataataagtgtgaacaaacattctacattattagaattgtcaacatttgaaaatattttaattattaattattcttatttacatatagtatccataatatttgtcttgagcaatattgtgatattataaagataaagatattataaagttgtaatatttttttggataaacatctaattttgtccctaaaaatataatcgagtgacatatgggtcttcatagaataaaaataaaaattagtccttaaatatacaaaaataattacatatcaatcctattgttagtttattccattatgtgttaatgttgatgcttacatggcaacttgaaatttaattgtcatgaaaatgaatgtctcatgagatctgactcaatcaatttatcattaaattgttaatgaactaatttgtcatttgcaagtgagaaatcggatttcagacacatgctaacatactatggaaaaaatcaccattataattttttttttaattcatggctcaaatttcttctttattttttttttctctttctcgttctatctttctcatttttcccctccttctttcttctttgcatccaccacaaaccttcataggctttataggttgaacaccatataagtgatgataaaacttataactcaaaaccttacaagttttgggataaagtgtgatatcaagttcacttacatggttgttcataactcattggtgtaaatctctccggtgtttactcctcaattgcataacaattggtatcaaagtcgatggttcaacttggtgattggcttggatgagtaagatagcgacgatggatccttggcctagggatcccttatatcgaaagtcttcctggtgccgagtccaagcagcgtgtcccgtgggtgaaacgacgatgcaagtatctaaagcatgtgtgctctaatggccaccatgaaaatacttgtgaataaaaatgacttccgcttgagggaaaagttaccatgtagaagagaagtacttacacttgagggagaaattatttgagtacaagtgtgaggtgaagtctcacatataacgcccctgattttcgacatcttggtggctcttacattacaacacttcacgcagtgacatttcactcaacatttttgttggtcataactcttcataagtagtccttttttagacctcaaaaatcaactttgtttgcttccaagattaatgacttacaacacaaaccaacacaagattttttggcgtgttttgtcctcactcatacgcgttccaaaatactttccagaaagtcacttatcccataactattctaagtaaaatacgctcaaccatgaagttattaattgatggactactgaaaagtatatgcatcttgttgatataggtagtgtcaattaattattttaagtcatccttagttgtacagtctcatacctgcacaacctctatatctctttcattttggtgtaattcaatcagggtgttacaccacatcggatataaatgcaaaagttgaacatcatatatgtgaggagaagacccataaacatgagtcttaagattttaggttaaaatatggtgtcaaattcatttatatgattgttcatttctcatagtcacttatatggcagtacacaaggggaaacaacgttgtttgggttaaagtagacattgacgatggggaccaaagttgagatgcgaagagctcgttctagaactcatgctcaccctgcagggaggcggagtccatgagcttcatcaccatgggatcaccgataagcgtgtaggtaaagatgagaattagttatatgtttagttttcaattattttcaggacactaataaaataatattcttcatgttatagtgtcgctgtatttgacgacatggataaggaagatgagagtaaaattgaaaaaaaaataatcttatccgttaattttaaagtgaataatatcggttgatgttgtaaaaaatatataataaaaattgataaattaatccatcgataatttaatgataaattgatcctgttaagtcactatttcatttaatatttccaattacatttgagtttatacttgacacataaagaccaaccaaaaaaactaatgacaagatcaatatgtcatcatttttatccatttggagattaaattttatttttttatctttcaggaattgatatgtcattgaattatattttcagggataaaatttgatatttattcttttttttacttgaattgttatgcaaaaaaaaaaaaattaaagcgtattttcaaacaaaagtggttttttctcaaaaaataataataattgagttcttattcttcttgactttttttctcagccacatgaagtgtgtcaaattgggcagacaaggcatgatattgaaaactatatataagtggtgcttgcgcatgcatttgatgatgtatcgatatatacaccaaaagtgcgtgaatccactaatggggcatgcctattcgtttttcccatcatcactttctatttgctggcacatttgtgcaattgcatcatgtatgccttgactgatccctgaaatattttcccttctttttgggtgatggggggacagtggctcattttgtacagggagaagctacaaactagcaaacaaacaagacactagcaacatcataatcactcgagacccgcatattgttacacctatagcttattttaaaggaaatcgatcctctccgtttttttttttttttccatttcttccatttttataagtttttagaaaataataaaatgaagacgatacactttatagagaataacttttattttttcaaaagctaaaagcttagtgataaaagaaatgggaaggatccaaatcctattttaaaagtaattataaatccacttgcatttcgttcttacaaatcctctcaatactaaataacgagttaaatatattttgttcaaattcttcattatgaatttgaacaaaatatattttttatgaatttgtgttcaaagtaaatttggtacggaaaattctttgttatgaatttcaatcacattaaattgatactaaaaaattatttattttatacatcaagtaacgaatttgttatgaatttcaatcatattaaattgattctaaaaaaataatatacatcaagtgtagtaccaaattgtatggtgaatttgagggattgaaagattcaaactatcatttgaaagtaggaattaaaaataatattttttaaatttgagggattaaaaaataattttttatttaaaagactaaaaaaaatacactccctaatttgaagaaccaaaatcataataaaccaggtgctttattttaaaaatcattccatgacttattcaattagttgtacttaaaaagtaataattagtcttcatataaaaaataaaataaaaaaggtaattagtcctcaaatacatcaaacaatgtattgttctaaacatgtatcatatcaacagtaaattggttaaatcaggggaaaacacatatagagaaataaaaaagagtgaggactctaggattttcttggattatgagacatatgtttatgtggtatttaattctaacagattctttaatcacttatgattcaaattctaggagaatattgtcttgattacaatcctttacaaaattgcttcaaaaacaacttttattaaaattttgattgcagtattcagtattgttctgattggtgtttttcattaatttcattttttagacttttttttagagttaggagggaaagggaatgaaagagattcaaggaaaatgaagaggaagaaaagagagaagtttctacatacttgtttaagagttaaaaatatattaagagaagaaaatggagagttaataaaatatttttacaattttacctttaaattgtgattaagtagctttttacttaaaatatcaggctcactgtaggtgacaagaaaaaatatttaagccttgactttgcaaaattacaaattattaatattagttatgtagcacattcaaaatggtttttaattgtttctacatttaatgattaatatattcatcaccgcacggaatataaacttgtgctttaacattaacattctcattgctttttgggttcagttagaatttgagctcgaaaaacagagatcatcatctttcactatgtatacgcacattattatctgtttttataattgtatgatctgttgaaccctcattcctcttcccccttcaattacttttctgtgcttggtaattaaattagaataatattggtccaaatgtgtcttggacacgtcagagaaataattaaatgatgcaatacaaatactagatggacttcagtttccatttatttagttttcagaggcaactctgttgtgctaactgtgtcaaacactcgtgtatgttcaaatgcttgatataaatccataaagagtgcttctaaggaaagcctctcaaacttattgtgtatatataaagtcgtagtgttattacatttggtcacacttcaaggtaggagggatccatataaagctatgtgttttaagatagccagctttttccaataaccagagattctgggttagatcccaagtgaattcgattttttttccttgcatttttctcacttttcagttttcactgccaatgccatataaagttattattccttgttgatgcaagattgatattcaaacggaaaaggatttcttgtcaaaactcatgtgtccgtgtaattagaatagtagaatcaagtaactattagaagtttgatatgttaaaaaaataaatggcttattttctttattactccctgtatttttatataatagtcgttaaggagatcttcattgtaatcaacaaatgtaattactccgtctccactcttttcttaataaaattgtagacacttttcctattaagtcccttctcttactccacgtttttctcaatacccataactattgtatactcctatttctctctctctctctccataactaacacatattcctaatttcctattggtcaagatttcattaattatctctaacgttttttttttctgaaacaaagcatccaatttcgtagatgtaagctaatgtttcttctgtcagccaaccttttgatatctgttgaagcatttctcttcctttgttcaattgacacttttgaaactgaactaaacttccctctataattttattcttaaaatgcttaccaccaaaagttttgatttgagtaaacattaagatctttcccatttttgttactctatacttgcatcttacccctcttcatttttaaatttagattcaaagcatgtattatctttaattctcttttgttgggaataagtcatttgtggaaaagtggagaagctggagaacgtgtatgtattccactgcatttaattttttgttgttgaagttttcaactacttataatttaatttatataaaaaaatatgtaaataattaattggaataatggtataattgacaaaaaagaaataatgctatctttgactttgaaaacgacagataaataagaataattttttattaaaaatctgacaattaaaaaacaacggaaggataggagtacttggaattatgttcgatcaaaatgtaataatgaattattttgaattttatctatttattaattgatgtatcctatgttagacttttttttctgctgaattaatgttagacaatactgctacctgcaattacaaatatgcgtgaaatatgttattaatccatataaatatggtttcatgcaatttagtcttttacaggtttttaattaatttttattctcgtaattaaacatcagtttatgctttcgtgctttacacattttttactaaattattacttacttctatttgtaaagtaaaagtaaaatgtatggtaatttaaaaatttattgcaaagaactacttaccaaagctatcattatttgaatcgcaagctatattacgataaatattgtggaaaaagattaataaactcaaaacaactcaacgacaaaagatttattttatcaaaaggttaatcattttttaactataggacattaatatatatatacttcacttcaaacaacacaggaatatatataccattccattgtattacgtcaaatgtcttagtcggtttgataagcacaaaaacgcaaaacaagacacaaggttgaaggccttgttcagttttataattaccagaaaacacaagacattattatcctgttttatattctattccattttactttgtcaaaagcttacccaaaggtcatacactagatttataaaggtcatactcatacatattaaaaaatgacgactcaatattcctaaaacacgttgttcacaaggatatgctcaacggtgcttcttactggcaccctttttaccacttttcttcataccacctttccctgtattggacatattggttccagtttcacgatctcttgatggtgttgaattttttcacattgagtgtgccatttctaaaatgaccttcacttaatttcagacccctgttctctggcttgtgcttcccagcagattttttactgctaccaccaagctttcccccaaattgtccaagaatcaaacgctaaaagccacaatgtaataggtacaaatttatacatgaataatgtcagtaacatacaaacagaaaaataacagggccagggggataaaagtggggaatgatagaaattaattacctcttttggagcattttctgctccctctccgtttgtttcttcatcatttgggcgtgccacacttataaggtaatatctgattcttggggggctacattttggaaaatgataaacagcaaaaaaattgtttcctgagcacccttgaactagtatttgcattggcacatggcaaacaaaatagaacatcaacaatagtcctcaccttcccaccaagacaaacaacattcctattttcaacctttttgcgttctttccttgtcatatgtgagtagcctggaaaatgatgcaataattagcagccattattagaagaagcaactgcactaccatatttgcttggcatattggaaaggcaaacaaaaccaggtgaaacgggtatggttaccataaagttttcagctctaacaccccaaaattaaaataaagaccaaacattttcttatcattcaagcatccaatatgcaaaataaccaattttagtccacacattactcaacaatttgtaagtagcactcttatatttccaacaacaaaatcctaaagaaaacttatataattggcaatcaactatacaattcaatcctctaaatcatcctaactaaaagttacaaatgaccttaaatgttgcaagaacatgaaaggacagtggtaaattgcagccagtgccacgtatcctaaattagaagattaggttgagactatttcaactaagaataagttatgttttgcacaaaaaagcagagactttatgaggaagaggattataaccatgaaagttcattccttgaccaacaaaattaagaattttacaagttactaactcctccatgaacttccaaatccataaacaaaaagtcaattgaaacatacaatcacaattcctaacttcctttagcgatgagatgtaatagtaacgtacttatttttgttccatgtggtcctgttccatgtgcatggagatcaagacaccgaaaaaatagtaacgtactcatttttgtatgcaaattagaacacgtcgtttgaattttgaacatatagattcccggaacaaccaatgtcacgttttattcgtttgaacccaatttcacgttttatttatttgaaacctatgtcacgtttttcgtaattccatggaaaaaggttataattagaaataaattaaattaatgcataaaatttaatctttatgcaatattacaatatcaaataatctgaaattattttcactgtaaccatattctaaatataacaggtgactgtgtaatataaatctaccaagtttttttaaaaataatgaatttcataataaaatattatcttttaaataattcttagggtaattattatgagagttaataaatttatgatacatactaacaatttataattggatgactatataaaaaaattatactctggatgcattttaattatgtaaatacacaaaaaatgtaataaaactgaatttaaaaaatagtaaatgacaaaccacttgcttataattttttttgacaaaccactctctttggtgctattatccaatgagaattagatttcatcttgataatttgtgtaaccttttttatgcaaacctttgttaggaaaactatcaaagtgaaactccagttctattttttcttcttctttagatcagttctaattgtttaatagcataaacaacacttaagaaaatttatctaacttttgtcctttgagtatttattaataattaattttgttacaaaagtcaacaatgtcttatcatacataggtagccaattatagttatgattaaaattaattttctttttaattttttttcctttgtggtcgataataggtttgtaccattccttgtatataaataaatggttaagctggcaacaactcctcaattttctgcatcacatcacattgcgcacagagatcgtgatcgaaaatggcgacgttgaaggttcctgctcaacttccttccccagtggaagacagtgagcaattgcgaaaagcttttcaaggttaccttaccaccactcattcatttctttgatttgaatttgttggcttttattttgttgttagatcatcgatctgcttatcattttctcgatctatctcgtttggatttaagtcttttggtgtgtccatgatctgatggggttttattatatatcaactcttacttagagatcctggaatagattgttgtgtttggtttatgcagtcattgttagttatttctgcttgatgagtgctggaaccgcattcgatgcagtcatatttttcatacgttcattcagttactaaactgagaccgttggatgaatatcagacaactcatgcctacaataagtgctttatgataacttttggtagggcagaattttttttacatttaggagaaagaataaaatttgtttggttcacaattgaaaatctttagataaattttttaggaatcaaagagttacaaataaatttttactgattattttatttatttattatattatataatttaataaaaaataatatgatattttttataataataaaagaaaaattaaactcaaaaaataaaattcacatctctgctataagaaaattttagtaagaaaataataaaaaacatttcagaaaacatcatttttcatgaatataatcttttaaaaatacatatcaaacatgagagaccaacctatgattccccataaacaaaaaatgtgtctcttaccaaatgcctcctaagttcaatctacaagatcgaatacaagccttttgattgtttttatcttcatccaacggttacaatttgctaactgcgtagacacgttgaaaattcgactgacggaatcattatcgttgagatttggtttcttttctttatatatatatatatatatatatataaaatttaagtttcattcttacattttggttggataaacttcccatatgtactcacaggagaaaaaaaatgaaaagatgtagatcttgtgtttttaagaactaaatgcaaacgatgtttggcccagcgttaattcagtaatactaatagttaatattagtatgtgtgtgttcagaagtgctcaaacaagtgaagatatagataactattacagaaaattaatacatagtgaaattggatctttgaataattcagaagttttcaaataagggaatttactttgttcctttgttttatcatggcatgagccattttttattctctcattgcaagagttgctttgattgttcatccaattttgtcactgtgacatatctttgcagggtggggaacgaatgaaggattgataatatcaatcctgggtcatagaaatgcagctcagcgtaagttgattcgtgaagcttatagtgcaactcatggagaagatcttcttaaagatttagacaaagaactttcaagtgactttgaggtcagtttaaatcttttaatatctggcttctttatgtaaatctcaatttgacgcccatttcagttttcagaagttagaattttcaatgacactatcagttattgaattttcaattttgataatactccatttctgtgttctatacggataaccttgattaaaggaaacggatagttgcagttataaagttagtttcttatctaatgtttaatgttttgaatataaaagcgggctgtgttagtttggacattggatcctgctgagcgtgatgcctttttagctaatgaagccactaagatgttgacttcaaacaattgggtcattttggaaattgcttccactagatcttcacttgatctccttaaggcaaagcaagcatatcaagcccgtttcaaaaagtcccttgaagaagacgttgcctatcatactaaaggggacatccgcaaggtaaaaccttaactttctaatgtacttgcttacaccttgataaagaaaagttgcatattcttacataatattcaaaggctgatgcctctgcttgatgtcatttcttcttcgatcaaaattttccaatgtatataaaccttttcaacttaaaagagaacctttgtttagaagtgtgtcctagatttatattcaagagaacctttgcttgatgtcatttgaattgctagatttaaaagcttattaatattaacattttttttatattattttgctatgtctagatgcatggttagttaaattatttttttaggttcctgagagaactttaaaaaaaaagaaaaaaaaaaaagaagcgattccaatcatgcatttgatctggcaatttttttcacacatttttccccctattttctgatgaaatacgtcaataacagctattagttcctcttatgagcatattccgttatgagggggatgaggtgaacatgacattggcaaaatctgaggctaaactgcttcacgagaagattgcagagaaggcctacaatgatgaggagctgatcaggattttgtcaacaaggagtaaaccacagttaacagcaacactgaatcagtacaacaatgagttcgggaatgccataaacaaggtatagaccttttgactgtttatgactcatttctatgattttagcctaacatctgctttttgtttgagtacctactgcagcacttatgctgatatagtgctgaatttatgaccatgttttgttcactttaagaaacgtgatttccactgataatcttgttttagatgaatcaattgctacattttaaaggattatattctgggcttacttcaaaacaaaaaaataaatatgaagacaagatagaaattgtgatttagtgattttagattaatcagtgactggtagttgaactgacaattcatcttatggctgcaggatctgaaaaccgatccaaaagatgactatctgcaattattgagggcagccattaagtgcttgacttaccctgagaaatattttgcaaaagtcttgaggatggctataaacaagctgggaactgatgaaggggcccttactagagtggtgaccaccagagctgaggttgatttgcagcgaattgctgaggaataccaaagaagaaatagcattcctctggaccgcgcaatagccaatgacacttctggagactatcagagcattctccttgcactggttggacatgaggattaagtgttctttctttctctcttcagttgtctcatggaattgatgcttaggctatttgcttttcctattatcatgaatgtgatgttgctgtggatctctggacagaggaattcagtggcttgccggtaaagctgcttacgagggggataaagtataaaccatccctgctgttttagaataatgttttgaatgtcgaaaattcaagacacagcgcttcacctctttattactattaaatcatagaatatttgctgcgtattttttctacttttataaagtcacaattattcctaccagcataccatcacatttcacaaaaagtcagtctagatagcttaaaggcaactataattgttaacttctcaacaatatcagcaaatatacttctcaacaattatcgcataaaaagcataaaccagatagagtaaataatttcttattacaaaaaaatctcaacaattttatttatccaatcatggccaaaaaaatctcaacataaatgaataataaacatttgcacccattatggcaaaccaaattattctgtgtcgggggttataccataaatatacgatgttgacaatccaacacactgatccttccagtcaaaacacggaacttcagaggaatttatagaaagtacacagttaattggacgaatttagatgatcaaatttaaacgagcgcaatgctgcttcctccaccgggggatctgcgggcacctagtagtatatggtctctgctttctgcctttccatcagcaaatatgtcactccctccaccgggaggtctgtgggcacctagtatatggtctctgctctctgcctttccatcagcaaatatgtcactccctccaccggggggtctgcgggcacctagtatgtggtctctgctctctgccgttccatcggcaaatatgtcactccctccaccggggggtctgcgggcacctagtatatggtctctgctctctgcctttccatcagcaaatatgtcactccctccacctgggggtctgcgggcacctagtatatggtctctgctctctgcctttccatcagcaaatatgtcactccctccacccaggggtctgcgggcacctagtacatggtctctgctctctgcctttccatcagcaaatatgtaactccctccaccggggtttctgagggcacctagtatatggtcgctgctctccgcctttccatcagcaaatatgtcactccctccaccggggggtctgcgggcacctagtatatggtctctgctttctgcctttccatcagcaaatatgtcactccctccaccggggggtctgcgggcacctagtatatggtctctgctctctgcctttccatcagcaaatatgtcactcccagccatttctctaagtttagctctgctcgaaggcttttccggtgatcctgcaggaacatctcccttgaaaatattattacctgtcatctctgtaaacttctggtcatgcatttttttcctcaatatcttaactggttgttcactgaatgagaaattactttggccatcggctcgctgcaacaataacaaaactagggtcaaaatgtaatcataaagaggagggagaaggcacatgagctaaagggggaagcacatggattagaaatggatgaatttacagcttaatttagaggaaaaattaatgtttcattattgaaaacctaagaaaaacatgtcttttgtttcaacaaaaaattctaaaaggagaaaaatgaaatttaagaagaaatctgacacggaaactacaaaaacatgtagacaaactgatggacctcttcaacataatgaatgtgcagtttggctctaactcaagataacaggctcatatcttggcgagggaagaaacattaatgatagaaaatttaacatccccaaataaatggtattcttccagagctgcaaccgtatttctattacaacccttgggttataactacataaaattagacaaattgttctgcatttaaattttgcctttcaggaaaccattaggctacatttttgcaccaccaaaggtaaaaagttcatcactatgaatagccataagacaggattagagcaattaaaaatttctgtagacatttatccaatataaatgatttatatgactcgtgattggtcttcatgccaagaagatacttacattagaaacttgcgcagatgtgctcactttttgtggaacagatattctggtgtctttactttcttttgattccaaagtgtgtgcagcagccaatgaacgaggcacaatttcaggaggggcaaatatatcacttccgctgagctccttggtcttggcacttgacgtttgcttgttgatcttcgtgactgtttcgctttgatatgttccaccaagttcacgttgctttgctatctcgggaagagaggttggttttttaggagaaatgtttccttcagtgctgaatgatatctgactgattccattcattgcttgctgagatgcaattgcagggaaataaaacaagaatactattatcacaatgaagttggtatttaagaaacactcgcattcatatggtcaaacctcaaattgccttggaagttggaataaggtaaccatctagcataccttatatacgcgtatgcttgttctgttttttgaatttgcagaattttcttctgatgtggtatcttcagaattacccgaaaatataccacttccagtcatctctttcaatttatatcctgagcagggtttcctgagtatcaagaagaagaaaaagaaaataacaagaagaagggacaggattactctgagaccatgtcagaagagaaaaacgaaaaaaaaaaatgattggatgcacaaggtggaatttgacttcattcattgggctggaagcctatttatataaaatgccacaaagctataagaagaaaaataaagcaaggtagttacaatcacaacagaacagcaaaataacagaaacaactagccatgacggctaataaccgaaaataaacatattaaaattaatcctttaacagtaaaacacatgaaaagatatgtttgacaacaagattatataacagcatgcactttttaacttaactagtagcaaacatactatagtataaattcgttatttcagtttaatttttatcacgttgaagttttttactctgacagctaaataaaaaaacactttaaatagtaaatatgaattttaaagcaataatttaattagaatgaaaatattatgaattatcttgtataatattatgaaaatattataacattattaatattaaaacattttatttgtaaaaaaaaattgatgtatttttttttttacaaaagatgttttaatataattggttcaaatgtaaattaagaaacaaaagaattttggtaattagccgaaatcatgagatcagtttttatttatttttttttgtacagcatcatgaatgatcagctgtatacacaaattcgtaccaattagcaattttccaaaaaataatttcgtgttgattgttcatcataacgcaattcttagagtttcaagtttcaacaactgaatgcaggatgccaatgattggcttctcaaaacgttcccaataataaatagagggaaaaaagtcgacacaaactagaagttgaaaaaccgcatagggtttacaagataaagaaacaaacgctgaatcggatcacagaacgaaacaattaaaaagttggaaaaaaaacaaacaataacagatccaacactgcgatagaattgaaaagaaaagatgatagcattacttttttgttagactctgtgcttcttccgcggtgagcttgcttccgcggagaacctcaccgattttatcagaaggctgtgaatagataagcgattcgaggaacaagctcattatatatcttcacgagagattcaattgaaccaactaaaccgatgcttaaataaaatataaaacagagacagtaaatagaagtagtaacctggcgagagcggtagccggaggcggaggactccggcggaggttgttcggaccacgttaggagatcggaggtggaggtgtgagggttccttagcggcgtggttctctggctctgcattttgtttagtttgtgaggggtgatgttattcaccacaccagatttgaaaaaacgtttcaacgataacgaacccaaataatcactatccaaattcttttctcttctttcgatttccaactgcaactatgccacccccacctacaatttacgaataatattatgacaaactctcgagaggttgagttatcagttattatgatggcacctagaaatggatactcgcactacatgctcaacgtgtgtcattccactcccttatatataactactttgagtagtagttataagtgaaaatatttttacttcttaaataattttttagtatcttcaaagtaggagtatttttattgacaaatggtggtttagttggtacataacatactcatattttaaaaatatatgggtttttgatttccattaatattgaagattttgttggtcgatgatatgtaaacaacataaaagaattatttattttgattttagtacctaagctcttattgttatttttgacataggtagtcgttattaatgaatttttgttaattgatggtgtggttaaagaaaagttcgcatcaaatacaagccatttaaatcttatcggtcaaatcatccattaaggtacctttttttaaaaaaaaatgttaaagtacaaacaaaaattagataccaaaacatccctattttagaagtatcaaaaagttatttaaacctaaaattaaaaaaattaattattatcatcattgtatcacacaaatttttcactcccttccttttccttttttttcaatgggatacttcttgaaacatggcttctttgcaacacacaaaagattttggcgaccacccactgtcgagctgtaacgaaatctcatggctgagcagctgaaaacattcgattatgatttatggcaagcaaattgaaaatgacgtcatagtagagggagacaaatagacttcaggctatgcttgaatggaaaatttgttaacaataaaagtaagaggggaggggggataaaaatttgcatgaattaaaatgaatggatacaacatatgaagacattaggtggggcgagagttgttgtgcatatcatatgacaatatgatgataattcttttttttttagttaaggaatatcatgccgagaaagataaaaaagagaggagcagagaattaatgtgatgaaatgatgatgataattaacttttctttgttttaagattaaataaccttttggtacatataaaataaggatgttttggttttgatatcaaaccttaagattaaataacttttggtacatataaaaaggtagcagtcaaggaaataacataaatgctaagtcaataatttttaaataatcaaaacttaatgatgtgacactatcttagttgtgtcaagactgattctaataagtctaagtcatattaaatatgattttaaatgttagtaaaaaaagttaacattacattgttatagtttaaatgttaaaaaatattttttaatctataataattttatcaaatgtaagtaagattgttacatgtagaatatacttgtttccttaacaaattgtagaatttattaatttttatagtaattatctaaaatattatatcaattattatttataattgaatatcaatatacaactatttatattttcaatgtataattattaaactcatttcaaaatattttgagggactaaaaatatattttatcttaaattttttatatctctttccatcttagcctagaaaaggatgacaatttaactatttctattttcaaattataattatagatccactattagaattatgcttaattaagacaacgttatttaaggagagagagattaataatcgatcagctgttaattgtgatatttgaccactttatcaacacttaataattggtgggtaatggtatatccctaaataagtagcttagacgttcccctctcaacacttacggcaatttctctttccagaattccgaaagttttgtttataaacgtagctaacaattaattattccgtgtttcttaattatctgcttctagcaatttaacattatcgtttttgggcaagtaaaaactacttatctccttctaactctttcagtcacggctgcaaaacgccacaacatcttcatgacgattttttacttccattttttgtggcttcttatttcatcttaaggaaagttatactcaagtaacttttagtacaaacaatgagagaacaaaaaaaaaaacaattagtttaagtaaatagaagttgactttaaaggtactttaatttgtgttttggtaattttgtttttgtaacatttatatttattgaaatataagcggataagaatgtgaagattgaacactctataaatgaaaataagattcataaatctaagctttaagattttagattaaggtgtggtgttaaatttaagactcaaagataaatttgacgtcatatcttaacctaaaaccttaatattcataaagatcttgttaaaaaattataaaaacttatttaaaatattatcaaaattataaaggacttcaaaataatttaaccaagaaaaatcacatgtacaatttgaaaagaaaaaaaaaatgcaattatatcgtacttaaacttacaaaagaagttgtgattttatacgggaacaaattttgcgaaaaaaggtatccttggggaaaagaaaaactatcttagagaatcattttccccaatttaaggttacgtttttgttagactttatgaaatttttcttgagtgtttaacacaactgtgtaacaaagactcacaaatttattaatgacaaatgatcttatctaaaacatttcaggtggtaatacagtactttggtatttgaaagtggtgtatgtgcgattttcaaacttacacacgaagtattcaaaaaaattgtggccatagctccctccatcaacatgaacttatgaagaagagccatgtataacgtgttgcaattcatcagtgatcaccctaattaacatttgtggtttggatacgcctacaacaataacggcaatgacccttctacttttaattgtctatcgactaatcaatttcgtttattaattaattgttaataacggaagaaaaaggttttttcaatttctagttggtagatctaagtgctaagacagaaattattagagtcgtgagttattatagataacagatagataccctcataaattgatagagtctttgttaaacaattcaagggatgtggacgccaaagttggcaaaagttgttgcatttcggtgttccaccatatatatatatatatatattgataactcacattaatacatgcaatagttcagggtggatttcgaaagattaaaacaaagaaagagcctaaatataagaaaaataaccttcgatcccccttttccttcgtgtatggaggtttgagaagcttgttagaattaatgtgaattataacaatattgtatcccctcttaagtaaaatatattggtattcaatgtaaatcagtttaaattcaatatcaatttaatctaataagtaaatagattgttccgtttttcttttgcttcttttttttaataaaaatattacatgttaaacaaaccatcaagtatataattaaatataacgaaaaaacttatcaaagtactaaacatttcatcatgattcataacatggccacataggaacaatgaaggcaacgccaagggatgagatgaaagcagttcaggtggcacaagaagaaaaaagaacataagaaaaaatcttacacaacagcatgggagtttttgaaggcaacaaattagctcgaagaacccttctttcctgctgttttattgattaaacaatttaaatattaatcattacatccaatggctacaacatatgaaccaatatcaactacctaagaagaaaggggggaaactatacatgattgatcaccacctatacactgcagagattatgcaatggttgtgtgctcgaagaacttattatcaacaattttggctgtttcagctgtttgtttgttagtcccctagtaaacattgaatctaggagaatatggaaaactcaaaataaaagcatataggattgacctttgttggcaaacctaatttatgctcggaaacagccagcttgtgatagactcgactcgacaacatctcaaatggtatactgagtccatgcagcaacactgttttagtaaactcactgcttgatcaatcgaagcttccaattaccttcaccatcaatcagccgcagttccatggaatgaaatggtattaaagcaggacgctgggggcagcagcagagaaatttagtttgatcacacattattatggctaacatgcaggtttaatgttagacaagctataactggtttatctagagctaaagaaataaaataagtgtacactaggaaggaaatgaggcaacatcaaaacaactaattagtgaactactcttaattcactaaatttaccatgacagtatttttttttttccaatatacttgtataatcaacttacttgtgaggaagtaacaaccgtgattcccatatcttttgcaagcccgtataggtgttcttcaacatcaacactagttgcactgccaacattattttttttaggatatgaaacaagattaacaataaaaacaagcaacaatttctctgaaaaggaaaagacaaaggcaaatcatacatacttggtgcactcgtcaaggataccaaatttgggcttatgaaagaacaagcgtgccttacagaacagagtgagcaacattaaaaaccataaaagagaatattttaaattataatagatgtctttctttaaggaattgaagactttctaaggggcatgctgtataaaacaaaaatatttaagaaatttaaaaaactgtctaaaatttcaagagattatatttacataccatgcccaatctttgctgttctccaagagaaagaatgtcttcccattttaaatttgcatcccagttgcttccctccctttctagaagataattcaaccgaacactctctaggataacctttaatcgtgtgtctaacaaatttcgggtgtcagcatgcttttcacctgaattagcaagttataattatcagagctaaaatggaaaagcaaataaataaaatgcacactttaaaacagttggagaagagcaagaaattgttattgatctgtaaaagaaaactgaccagaataattttccccaaataaaaagtaactaacaacgaacgccttaccctaaaccccaaataaaatgttagcaaaagagaaattttcaacaatatcagcatgaacatcattctattgaattgccacaaccttagaatagctcagaagaaaacttattctcagctagtggtgattaatgaaaagtaacacaatagaattgttataaactttagttgactcaaatactaaaaacagtagacttcaaattactcactttaaccatggtaatatccaaaattattggtcaatagagaatcaaagcagatttaccaacttgccacttgcttatgttaatttatagtcagaaactttcatttttacccataatggcatttctaaggcctgccttatttctcccacccaagatatttaccttttccatacatcttcagtactttaacctctgcttcctcacaggaaaggggatatataatttgatcccttagggttcccaaacatgtatatggacgttgaggaacatagaagatgccacaaccatatccatcctcttcatccacaacttcagatggtctagatagtcttccactggcaattggccatagtcctctaagaactctgaaaatggaactttttccacttccatttggaccttttaaaaagaagatacatgtaagaccaaaatttacatcacattggaattccctcttctgaaaggacaaaccaaataaaataatgactataccaaccagtaacaagtaggcttcccccatgcttaatgtcaaatattaactcccttgccaacatcttttgagaaggggttatgatatcaacttttgagaaggaaatgacatcactggaatgaacatccctcactggagatatagcactaacactcgtgaaattctctgtacggtagaaggtcatattagcacataatttgatggctattaaagagatttactgccatacaaacagcaagatattgattgatatgattgattataaaactaaagaaggattaaataccagattgtgccgcatcaagaagttcttcaagttcaaaaatccgattaattccaccagagagttctacaaactttctatgcaattcaagaatatcaccgaaagctaaaaagctttgagaaacaacagatgccaaaaacctcagtgcatgtgctagctcacctattagtatagtgttgtctgtgagagaggagagcaacaagagaaatatagagtaaatgattcaatgcaaatatcttaccctgagtagttactgatgcacggtctcccttgtgttccatggcatatattaagctcaagccccaagtcacattatgtggaagttgctttgtgataaaatcatccaggatgccaaacagccacttcttttttaaaaggtactcggagtggctgagaagttccctgaatctagactcgaccatctgctcaacattaagagagtaaaatttagagattgacgataaccatagttttaatctgctcctgttattaaaagtagagtcatccaaccattatcaaaacataaataggaattaaaaagaaaaataatttttttgaacttttcctgtcaaactgagacccacttcacacttccccatattagagccctacattatataaaatttgatcaaacacataacatgtataaaatttagggtatgcttaatcaaggaggtggaaaatgagaaagtggaaagttatgagaggactgaacacggggatggaggctgagttttactctttattgcttggtaaagattgatgatgaacccccatcataatggtacagttgctgctttatgaccagacagtcaaggttctaattgcagaaacaacctctcaactcatagttataacccaactgccctttattgcttccaaaaggataaaacttctttcaactcactttcaagtaacaggagtgtccaaaatttgaatggtgaattggcactctagtttcagtcatcccacatttttattatgacaagcattaggtttcatttcaacctttcatgtcctcaaacaagcacacacttaaagaaaatacattaaatattgcagagttaggatgctcacagctttttctcgagcaccacctccaaagaaagcaacagattcagcatgagtacaaagtctttcatgcatgaacctagaaaagcataaagagaaaccgatcagaataatttcaacagaactatttgattagtacctggattgttagctgacagtagaatgagtttacctaaatgttccttcaagctgttgttctcgactaatcaaatcaccaaaatctggagtaacagttcttagaaatcccaaaccgagtaacatgtaagcatagagtatggcaactcccctccgacctgttaacagcttcattctccaagtgaacctttagaataacgaaagtactcagtaagtaaaaaaaaaagagcataataactctattttgcatcaatatgttaattgaccatgtacaagtaaaatacaccatagtaacataataactctattttgcaaatgaattactcaccacaaaatatccacagatggctttaccattccagtgaccagtcctgacaagtctgttgttaacttctccaagtcatgagttatcctctgatcagcatcaacatttttgcttgccatgtggaagacctacaaagaaatgtatgtaatgtgaattcagaaccaagccccagtcatccggcatctgcctaaatagcttaaaagcaaggtgaataatatatttattattcataataataacatcacattttttgttagtgaaatccaaacctagtctacgttctcaaactattgacatgggaaatttggtctgtggcatcagtaaggttcctgggataacatccctatggagtgtcaaattactgagttaattaattttaattttcccacattttacgagaaaatgatttgtggttaaatttaaatctaataccatcaatcctaaaaattgccaacttcacataaatgtatgtgaaggtaaattttgttatttaactcaatagttggggacactggaactatgaagaggtcaaggaacaaaattgaaaactgagttaaatttgaaggggaaatagtagaaagtaatgatatcaataagactgagatacaaaattatttcaataaaaggttcaacatataaaaataaaacaatatgtgattgtggttcatcaggaagtagtaattattcaaaagcataggtatggagttatggacacaaaaacaagtttacagtatgaaaaaaaattaaagaagtgaagctgaggaatgaatgaatagtttaccttgtagaatgcattgtttcttaagtagttcttgagtagatgttgtgtcaaacgaatctgccccccaagggctagcctcgcagtcaagtgtctgtagaacaagacaacattttaatttttaaatttacttttcaaagactcttgttaggtcaacctattcaaactttttcccagtttcaatgctttgaactatctacaaattatccaatatttttcatattttaagtgcaatcaataatttatgaataatagaatatagaatcaatgggatgtaaactcaacaaaagggcgtagttgaactacatcacaagccattgtaaataggcactaatttaggataaaatctccttttatatatttagaatatatttgcaattattcagataatttttttcctatttccctcttgtcaatggaattgattagcaggacattagttattaattggcacaaattgcagaataattgttgttattggcacaaatttgtgggccattcaaaaacagcaaatcttacatgattatacagctgtaattatctccttaattagttatcccagttgtaggatagcatttattgaagattggctatttaatgcacagatgtagaaatcaaattgtataaacactatttaatgcagaattctcaacatgagagaacaaacagtttatcatctgcaaatttcttagtctaatatggtatcagtctaggttgcgatcatatcatagttctgtccaaaattcctaacctcttggttttgcaagactatccagttcttgctccttgttccttttgtgatttctctcttgtgattaccttttttttccttagccttatgtctaatgacaagtatgatgcttattcattcgccttaatggcaagaaccattctgcctgggcattccagttccaaatatttgtcaaagataagaatctttggggtcatgttgacggcaccagtcctgcttctaacaaagaaaaccagccgaacgaatatgatgcatgggaagtcaaggacgcctaagtcatggcatggatcataggctctgttgatcctcatattgttctcaatcttcaaccattcaacactgtagccaagatatgggcctatctcaagaagatttataaccagaattcatggcatggatcataggctctgttgatcctcatattgttctcaatcttcgaccattgaacactgcagccaagtgatgggcctatctcaagaagatttatagccagaataatactgctagaaggttccagctaggacaagaaattgtcatatttcagcaggatagtctctcaatttctgaattttatcttagttcatgaattgttggattgaatacactgacattgtctatgaagatttgtcaaatgaaggtcaaattgcagtgcaacaagttcatgagactacaaaaagatatcaacttcttatgaaattgagatttgactttgagagtattcgatccaatctcatgaatagagctcatgtcccatccttggatacatgcctcaatgagcttcttcatgaagaacaacgtctcctaactcaagcatccatggaacataaaaatctggctcttttccagttgcatatgctgcacaaggaaaacttaaacgtcgagacctgagtgttgtccaatgcttctattgcaaagaacttggacattttgcttcacactgtcctaaaatgttttgcaattactgcaaaaaagatggccatatcattaaagaataccccataagcccaccaaggaaaactgaaacagcctttactgctgcagctggtccttctgcgaatcaaaatgctcttttgcctctgcacaaccaatgaccctgaaatggtccaacaaatgataatttttgcattttctactttagggctttcaggtaaacctttttcttcttgtactctggtattttgactctggtgcatccaatcacacaccaacagtgttgaatcccttaaaaatgtcacaagatattacggtaaccttcaaattcatactgctgatggaaacaatctacctatcacagctattggtgacatttcctcctctttaaccaattgttttgtttcccctggtctcactagtaatcttatttttgttgatcaactagttgacaatgatagcaaagttgcattctcaaaatctggttgtcttgtgcgggatcaacaattagggaagatgatcgcgaaggggcgtaaagtcgaacgtctttttcctctttatttctctcagcctcaatgttcttttccgccttttgtttcttgtaattcagctattgttaattttcaaatatggcataagcgccttggtcatccaaactcttatgtacttcatggcttactgaaatctagtgttcttgataataaaatttccttagtgttgttcaatttgattgcaactttaacaaacttaggaaagtaaaatactaccatttccaattcataaatcaaaggtaaatcagccttttgatatgaagtacactttcaacagaaaggcatttttgtcaatcagcacaaatatattcaagatctattcaattagttggtctcactaattctgctcctgacactccaatggaaattaatctgaaattgcgacgagatgaagatgaccttctacaagacccaactttctatagaaagttggttggaagtcttatttacccaaccattaccagacatctcacttgttgtccacatagttagcaaattcatgcaattttcttggtgtttgcatctttcagcagtacaccttattattaaggatctacttggtacttccaaccgtggttttttcttccctactggtgcatcaacacaacttcaagcatagactggttctgattgggctggatgtccggaaatccactactgactggtgtctgttcttaggggaaactccaatctcttggaaatgcaagaaacaagacacagtctccaaatcatccactgaagcataatacattttgacaatacaagtgtcattcacattgccacaaatcatgtttaccatgaaaaaacgaagcacatagaggttgattgtcactcaatctgggaggcatatgacaatcgagttatcaccttgtctcatgtttctacatctattcaactcgctaacattctcacaaaatccttgacacattagcaccataatttcctagtcagcaaattgatgcttttagacttaccaacatcaatttgaggggagacgtcaatggaattgattagcagaatattagttattaattggcacaaattgcagaatattggttcttattggccattcaaaatagcagatcttacatgcttatacagttgtaatcatctccttaattagttatcccagctgtaggctagcatttattgcagattggttatttaatacacagatgtagaatcaaattgtatgagcactatttaatgcagaattctccacaggagaacacagtttttcatctgcaactttcttagtctaatacctctttcccttgatatgtttaatttctttattttgtttaataaatttagcctataaatagggatttgtgcttgtattgtaaaacacacctagtaatattttttttcagttcttttcttttcaagttcttgtctttcaaatcaaacattacattgaaagacagcagttgtcatgtacaaatatcaataaatgaacaataagcagattaccaagatttaggctcagcctaataatagagaaacatttcataagcatctaagatcaatttattgaagaaattcatgtatttattgtggaatcatggcttgattctttgcgcaagaaattgaatggtaaatggtaatatgtcaatgtgaacaagtattgagatatccattccagtcatatactgaagatcaaatacctaatttcaaacccccacaaaaaatattcattcatggaaggaacaatttagacacaagtgaatcccaaattaccttatagaaggtgcaatgaaagaagatgcagcactttgaagaacacttataccaattaatcgaataaaggaagctttatcctgctccaaaacaagcttcacagtagtacctgagagcataaataccctagaatgttataaatatgatctctcttaataatgaaaagtcaaagataggacaataccattcagtgatgcaatacgatctgagacccatgttcttgaaacaacaagaaaagcaacagcaactagttgtgctccttgtttatcaaatatggtgggcacctgaaagcatgcagtacacattaaaaaaatgcacctgagatctatcgtatttatggattaactaatgtgcacaacacatcctttaaaaaggatgttggctcatagcaagtcatcaaggagatagtgcacaaatgactgcatagtttcatttgtttcaccgcattagacacttaactgcagacgcatcactgaaatgcataaaagatgtactaaccaacatccttttcatagtaagtcgtcaatgagataacacaaatgaccatagagttacccagggcccagggggtctagctaaattggttgagcagtgtatgtgagttattgtaaacaccttgataactgcatttgattcatatgtataaaacaaatgaccagagtttcatttgtttcaccgcactagacacttgactgcagatgcaccactgaaatttaagcataatgtgtaaagaaatcttattcatattaacttcttaaataggcgctattgtaatttgatagaaatataaaccatttgtgagcctacaccaaacagctcaagattttgggagagttagcctatgatataatatcaaagccattttaactgcttcagggtttagacagggaaaaggaaaacagaatagcagctaacaatgtattatagtaagaaattgcaatacccaaaccctatactttcatttatactgataatccagttaagtactagtgttacaaacagaaggccaaccccattaacaataagactaataacttcataaccctaatatcttccaaaaataaccaagtgatcaagagtttagtaattgtcacccccattttgaaggattaaattaaatttaagcataacataaaagtaggcctgggtattattcaagcttcaagccctcacatgagttttttttttttgggggccgggggggggggggggggggggttctagtcagtgtagatgataaaccaatatagacctccaccaaacagcttaaaaagcttttggaagtgttggtctttgtaataatttttcaataagctaagtcaaactgtcaaagatgtctaggcccccatgctattaaatggaataaagtttctatctttatgaattaaaaagtttatcatcccccctttttattgaagctacttcttaacaactttcccagatatgttgttatccagaaaaataattatatttctttgtttcaaagccctagttggttcctagtttaaatcttcctagcctctccagcaggctccaccatcacagtcctgaaactaaaagagcattcaattttagcaagtgaccctgatcttaagataacctctgattcaataaactcattaccactgttagtcaaacctaaaaactgaattggttgatcggacatcctgattttgcataactttactagcaaggtcatatagtttgagagaattataattgcaccaactttgcaaccaagaaaaatctaaaaacaaaactgcaagtaagccaacctacataacaatgtcactaatcactatcaatcagaagtatactagaactgcaggttgcagggatttagaactatagtaaattaaattgacagaaaagatctaggaagaaatatttagacttataaatttataattaaccacagaaaataacaacacctaagattttcgtaaataatgtactcaaaaacatatagaattaatcaataattcaatatgatggaaaagttgttgactcactaaaacaatataaagtaaaaatcttactggagcatatcaattcaagatacttaccaatactttgcacatggcagctactctcatcggcaatgcctttgtattaacatgaagttgggggacagcagatggtgaaatattacgctttatagatggagatgatgctattatcacttctgaaatatccgattgtgcctttgaatttgagaatgcagaatcctaggcaaagaaaaaaacaaatagggaagctttcatcatcaatataagataatgaaccgtgaagaaaccaaaaacaccagaatcacaatatctaaacctttttattcatagcaaatgctcgttgaactgccttggcatcactctgtctttttgtctccaaagccttcattgtatcattccccaattcagtagacgagtcctcactggagttcaaaatttgaatcttatatttaattacagcttcatagtaaaacaataataagcagcacagtaaagttccaaccttctatgatgaacactccatcctccctcaccatctaaagacaaaaccacatcatggaatgcaactaatgctggacgatgtgatatggtaatacatgatgttcccatagccagaacattagcacaaaaacgttcttccatatcagtagtgacagcacttgtgcactcatcaagaatggcaaatttaggtttatggtaaaaaagtctggccatgcccaatcgttgttgctcacccaacgaaagttcatcaccccagtttacctctgtttcagacgggtaccgatccaatagatactcaagatcaaccttcaatatatgtacaagcaattcagatgaataataatggttaaaataacatataatcatcaaacactaaacattaatgtggcactgagatagaaggaggattagatgtgagtttcacatttttcaatagctccaccatcctgctatctgtaagtggctcaacctcttgatcagcagtaagagggtaaattaactgatcacgaagtgttcctacagcagtatatggtctttgtggcacataaaagatttccttattaagatcagatccaactccaggtttcacaatatgtccagataccaagggccaaagacctcctaaaacccggaataacgagctctttccactgccatttggaccttcagcaaaataattgtgaattacatgtcaaaacaatcaaccattagaaatcttattttaaaaatccaattatacaagtgaaacatagtcctttcagattgtcaaatgaaagctaaacagataagtatcataacaattttggtttacttaatcaaattccaaattatctaattttccagccccttcaaatgcacatgctcatcaggattataatgaccaaccaggagtgaacaatgaaacttttactattttgttgttagtttacattttcttgaacacatggatatgtgctagtccacacattagaactgatggattgctcaaactgtgaaacaaaacaaggcttaagaggtagaactggttcaatgatattcccacaaaatgcatcaaaggaagtgagattttaacactgtgcgtagcatctgtgggcagaatctcaatcactagactacaaattcactaattaattttattacaattattatcattcaattgtatttgattggtgcacataaaattaattatcaatgcaaaaaaccttttgctaaaaataagcaacatttatgaaagcagtcaccttattaaaccagttaatgatcaacatggcaaataacagttattaaaccagttacattgtcttgtttgattgataaattaaaaattaatgcaatcctaaactaactagaataacctaaagaataactgttagaaaattcagcaactagtaatgatcaatagtcattactaaccacacgccagtgggtgaggtgaattgccaggagaatgtgttaagggtaaaagtgggttatagatgacatcgggtaaaaacaatgctcatgcgttactctggacagctttccaactcaaccggtacatgaacaacaagcaccaagccttatcccactaaaagggaatactcagtttttatttccaaccagccaacatcaataatttacaatggcacctacagaaattgcagaaaacactcatttgaaataacatagcttgaatataacatgtctttgacacagaacctggctgaatgcattaacttaggcacttgccaataaaaaagagacaaaggaaacaagacaaagttctatttacattattgaacttggagtcaatagtacacaaaccttattatacttccagccatgtagatacaagcacaaagctgtatgtacagaagatatgcaaaacctttctagtttctagacactatgaatgcacataataaaaattaagccccaaaatgcatgaatcaattcaacttcccccaatcaaatacacaagagaatgattatttcaacaaatgaaaagaaagaataatgaaataagatcaattatcatggttgaaccaaccacaaaaagtaaaattagaaacgaacagcaagcagagagttcaaatggctacctgtaatcaaaagatttgatcctgattcaaccttaagggtcagatcatccactaatacattaccggtgggggtcacaacctgaattttgggagcaacaccacaatcaagatatgaaaacataaatagaagtaaatgttcataaatagtcagcagaattcactagccttgacaccataaaatccaacatagttagcttcacttatgtaatttctacttccttgtctttgcagtgaagatttcccattgtccaggcttagctctcttgatatggtcattaactcgtgaatgcgatcagcataaccactgtaaaacatacagataactagaatatttgtatacaaaaaaaataaaccctagaaaggaatagcatcaaagcatgtcctctaatatcaacttctaaaggaacaaatgaccagtcaaatatacctgagtcggttgagccgtcttgcactaatagaaagagttcctagagattgaaataaggaaataatgacactagtatgatatcttagattgcttagcatctctgcacgccctaaagttgaactgtcaggccttagatggccagaaaagaaaggttcaatgatcaaaataacagcaacagtagcaccaaggtacttcaataaaaaatcctgaatcatgccaaaccaccaatggtcatgtagcactctattaatatgtctaactaaggtcctaaacttctgctgaatatgagcttcttctctcctctctccaccataaaatgctatactttccgagtgagtccttaaccgcgagtgaagctgtcgatactctccttccaattcctgctccctggacataagtttaccaaatgcaggagagaagtttctgattgtagccccagctccaagtacgtaggcctgcagggaaacaactgttatcaaaaagacaactaaacttaagattacatcaaacaggctccagccatcagcaacccaaaacaaaattatgaacaatagctgccagtgagaaatcagtgatacagtacagtttaatgagagtaccaaaatccagaagatatatttagggcttgcatacgaacacagccgccaagtgtatagcagtccatcagtcaccgcagttagatcatcctgtacaatctcactcaactctgaacagaaccttggcacatcactggcaattctttgttccggattagttatccgaccatcaacatgtgatattttgtaatacaccatgttctgaaataaaggtaaatgataaacagaaagctgacataaaaactaaataaaacattataacatttgatgacgcatggactactcttcctataaccaccaaaatatgtgcaatagtgcatgggatggtgattggcacccttgcaatttatatatatataggggcttgctaatatgcacagaccactttttccattggtgtgtattagcaaggtgcaccaaaaatttaggacagaaaaaccaaccttatcttttattctaataaactctttttagggatactatagtaatttgagataatttattttaaaaaataaagaaaaaaaatgtcttctctctcctactccctcatgtagtcacgctcatttaacattttaggtctttaacgaaaattctcaaggaggattcatctctctttttctactttgctttcaacagggcatgtgttgacctcactacatttcacctctattgtgaaaataaatttaatatggtgtgtgcatatggtgagaattagaataatgactagcaagagatagttccatatttatgcagaagatatcagcaaaaccgtgttgtgtgcaaattagcaaaacagaagccgcgattgaggatgttgcggaggaggttgcagtgcagatccgacatggggagaaaaaaattttaggggagagaagcaattttttccttatttttaaaaaaaaaaaaagaatttatctcaaattactataatatcctaaaaggagtttattagaataaaagctaaggttggcttttctgtcctatatttttggtccacattgctattacacaccaactgaaaaaatggtgtgtgcgtattagcaagccccatatatatatatatatattgaattctggataatgactcttattttgggaaaagattgagcagtagtacaaagcacctggagggatagcttaaaactgaaatgctctagtcaggaccagtccaagatcccaaagctatgcccaaaacaagaataactgaaccacaagacccctttttttattaattattaataagttcaaagccatgtacctagctgattaagagtctgtaacaactattgtcctctttaagcagtataaagacatgacagaacttaaggctaacaggaaatttttgaaagcattgcatattgaactttcatacactgcaaatgaagaagaaaacagacaagccttataaacaggtaaaaacaactcggaaagattttagttcacaagtatatatacagacacttcatatgacaggaggaatgcataaatggataacaagatcaatacagacaatcaaatatagtaagcttttacatacaaatcaacaatatctacctcaaaatagcgagaatggataagtttagtcaatattttacggaagtgcagactcaaagtcccagtaatgtacttagatgtagactgcatggttgataagaggaaacacaaaagaatattttctgaaattagccgcagaaacaatggcacacgtcgaagaaaagcagcgcgaaataggaaaccttgcacttttgctagcctgttgctcaaagtggttcgcagcacctgcaaatatgtgaaatttaaatgtcattgactatcattattatttatttctggtgaatcaacaaacacattttcttttctgatattcagacatctattctcatacaaacttgaacagtctactgtagttttctattcaaataaaaaaataaaaaaaataaaaatctctttttccccaatttacttaaacactctactatgtctacatagtgggtatacatgacatgttcatgaatgatgcctcacaaagtccgtcatttaccccttaatctcaaggataagttgacagagtaaaatatcacaacaaatacatgaatacataaagcaactgtgcattgaaatgttgaagataagcacaaagcatactatccataacaaaatagacttaccactatagaaactaaagctaaaaggttctttgcacctaattggcccatctcagataaaagaattgcagcaaggacttgaagtgacttcaaccctcctttcttttgtttattctttggtgcagaagttcctttcacgacctcctcctttgtgagttctttatcattattggactcataggaatcacctaataaatcatctctattacctctaaaccttgattgcacatatgctgcagttccaccagcaactaagataccagttgcaagtagcaaagtttttctggcacagaaggacaatgaataaacaagataaaaataacatgcaaaactagttcaacattgtagtgattttattaataccaaacaaattagtgtataatgaaaaacaggatactactactaatatgaagacacaaggctataatcgaagtggaaaaatatttatctgataaatgtaagataacaatgttaaactcaagaagaatacatcaatatttcatccaaaatcaatcaaccacaacatacatttcccttaaagaagcaggaccttagagaaataaattttagatcaataaagaataatgaaatttcttaacaatagttctattaggacaagttttgcagcttttctgatctctaatgataagcctttaagcatatgtttcaggtggaaaatcatacccaaagaaggcaagtttaagggtcaaccattttactctaacgaaaattcttgataattaccaatttctacaatacttatcaggtatctgtttctaaggattgaaatgcatgtagaattagaggtcttgagattccaacacagggattttgatgtagcataaaccattatctaatcctatttattcagtattttttggatcaaacgtattagtattgagcattgttgcaaagtttttaaattgtggttgactgattgcaattacaatttcggaaaaacctggatattgcagaaaattgtagataaatgtggttgatgcaaatgcaattgtggtcatgctgtggttctaaaataaccataacaattctttaagggatcaaacttttgagatttgagcattatgtattctattgctgattatgagaatgtgatcaaatattctcttcaagcataaaacaaagtttagttatagagccattacgggaaaaaaaaagttgataaaagcataaacttggtgtagtaggtcaataggaaaacaaattaagtggcaagtcatcatcaacatctaaatgaacttactcatcaccaaaaacattcagagaaaaagttaatatacctccttgaagccagaaaactccggccatgctgagttagttggaacagttgaagggaagacatggcggaagatcaacctctctttaccaacaaatgaacgtgtcacaattgctcctcatatcttctggggcaacaaaatctagccaaatttaaaatgcacagaagaatgacagatcagcagccagaacagtgggaattttcaatctcaaggcaaagtggcattctttagatgcaccatgctcgtttactcacacaatcacattattgaggttcccatatacatgtcaaaccatatgcacatattttgtgagcatggtgtttcagttcaagataccaaacaatgacctcatcacatcaaaaggataattaaataacaacagccacgtaaccaggtatcttttaaatcagatatcactcattattaagtataactaaacaaaaatatacgcaaacaaatttcctcaaagtcaaaaaaatattacatatactaacataaaactctccatttgtccatagcagatcccaaatgtgtaaaaatccctaacagtagctcaccttcaaggtcaaaaacgttaaccatgctccgccaatccaacgcgtagaacatatttgctaaaaaatagaatattctagctcaacaacagcgagcatcttcgattgttcgtgaaagtaagtccacagcagcgatcaaagcaacatctcagattctgcaataacgtcattgatcaccgcaaaagctcgataagcgcatccgaagttgtatacaatagagaaatcgtttttcacataaacgaaaacaagtcaaacaaacctaatatacaatatataatcgataattaatcctcattcggtgaatgaagctgggaacgaagaaggaacacgaaaattgatcacgcgcagctttgctccaacaacaagtgagtcaccaccactgatattgaattgaatagaaaaggaggtttaagaattatgaggtacgtgtttggttgcgcgaattatatatctagttaagaataaaatactaacatgactgagacaaaaagacgaacaaggtagaacctaaccgaagagaagagagaattgatgagatatgtgaagataggtgcgaacgagggattagagtgtggaacgcaatataccaacgtgttccacacgggtggtcttcttctctacccaccatgaccgattgacaaatcgggtcgggttaatctatattagtatatttttgtgtttccaattattaaaaatgtgtgtttaattcacagattcaaacctctaactaagtaactatcacatgtcaaatcataaaataaaatgtagctaacaataaattcaaattataacaaaggatgatataagattaaagtgaactttttttaaggtatgattaaaatgaacttgtttctcaaatcagtaagaaaatatgcgtttatttatttagtttaaagaaataagtgaagaaaagtaagatagtgattgcactaaaaaaaagtaagatagacattggccttaatgatataagaatatgtagcatattaaaagtgtatatataattcaaaaaactctgtcaatgacaatttaggttataataaaggatatgattgaagtgcacttgctcttaaagaattttaatattttttaaaataaaactagtgtattttttaaaaaattatattataaaatagcctttttaaaatttaaacaaacaaagttgcatttgcttactttaaaacaatcacatttcaattttttgaataataaatattattatctttgtgccttttttatttctttattttgaaatataatatatagactacaaatataattcataatttcatttatattaaaattagttttaatttttattatgacattattaatattttaaaaaataaatataatttaaagtaataattaatattatctcaaatttattaaaaaaaataaagaacacaattttatttatttatttatctttttttaaaatatttatttatttatttatttatttcttgataacgaacaaaattgtattttaaaagtacatgcataaaaaccaaacagtcttcttttttctacagaaccaaatagtcttacctaagaatttgtggatcgatggaacaagcaccaagccaacggccaacccgtttccaactttttaaagacattgattggaagaaatcacccaacgcattcaattcaaacctttatattaatgttacacctgtgcgtttcatgacttcataagtagcggcttataataataaatgaaaacaatatttcgaattggacttataagaaatattgttttcaaaatattttaaatgagtttggaattagattactatgcatgagttagttctactgaaatgaaacaaatataaatgttgaaaagtactgaatttataaatattgagaaccagtgtataagaatggacagaaatacattgctggagctacaataataatagttgagataggcatgccaaaagaaataaaaatataggcagtcggttggtcatcggttagttagatatcactactcaaaatgccaattagcaatcatgcacgtgaccagacttgtcccaccgcattggcatctcttatttattagcctaaaataaaataaaaatcttatcccacagacacctttaggtttaaaaaccaaattctattagtccagattgatgtattaagtaatttattatttaattaagatttaaatattttttaattcatacaatttaatttttttttttacttttagtccttaaaaaggtaaattatttttctgtttttcattattgtgacgttttagataacgtttttttttcattatttaaagtgttatttaaattgttttaagaactaaaaatagaaacataatttacaatgactaaaaacaaaaaaaaacactaaattacaatgacaaaaaattatttaaaccttcaattaatacatgtttgaattaactttaaaaaataataaatttcaacagctttttaaaagaatttaaagaacaagattattttctaaattagaaaccaatcatcacaatggatgaaagaaactataacatgcacaaataatgaggcaaactgcaaccaaaataatagtggaaacggactcagaaaacttaagcacaaaggatttatatacacaaacctccggggaaaataaagggggaaaaaaaaacttcacatcctccaaacgctatgtagttctccaaacttaaaatcttcaatttttacacttgacaaggaaaatggggagaacaaatatggaacatggaaaactttatataaaatatcaacctcaaataatagtaagaccaaatactcactcatcactttcaacccgccacttactacaacgagcgacttagaattttctctttttaaagcccacaaagcatgtagagttagaatagtcacagcagccaaccctgcttcattcgtgctggagagaacaattgcaccaaatgcaaggattaccatgtcaaggttcttcttccgcaagctgcacattgtatccatgctttatatctggaggaaaccaaacttttgaggattaggcattacaccacttgcaaaaagatgccatatataataattgcaatttgcatcttaattcagtaattaaaaactatgtgatttagtaagattaggggctcagttgtttttgtaagcaatagcatattaactttttccaacaattattcttttctttttaagtctgggtccaacctattcaatcaaattttctcgtttgcatgagtataaatcacagcctgtctgactaaccatataaagggcaacgatctgaactattcaatggttttatcagacaagtaccaaggcaaatacaggacgtctggcttatagcacaagctttcagcaattcagctgatgatcagcgttccgaagggtggtcaagtgatgctacaaacaaggaaaggctggttacccaaaatccagagtcgcataggacctattcttttcaagaagtctaaaagtcgaaactaaagctgagagatacagattatatacacatgaaaccaacaatgaagataaatctctaccatatacatattttagcaaactgaaaagtttaacgttgctgtattcagtttttcccaaatagacagttggtgttcctttcgggtgggaacaatgtcatccacaagaatttgcatatcgatatttcaagttgataggacctattatttttgccttttactttaaaatgcaaactctttggcatattagccaatttcagtccccactccccaaattaaacatgcataatcacaagcacgaagtaggatcacataataatggaaattattaataaagcatataaataggaaatttatagtgaaaatacctttcatcgagggtttgtcgtaatctttcctctcaccatcatcattattccaatcaccatcgtcgtcatcgcccatgtcatcccgtccatcatttcctatatcactttcactagctgtctcccattcagaatcatcagtctctgggccatacatatcaccaccatcaccctgactatggaccccaccatgcttaatagctgcctctcgaaataaccaagcagcacgcatctgcttcttaactaaacgctcggcataatctggaactttattttgcctcagtgagagatcaggatcatttgactgagagcactcatttataaataaaatagcatccaataaactctccttcgctaatccaagcatgtcataagcttgtgctcgtctccaaaggcttttggcatgacgattgacaggcttatggagacatagtgcacgggtagcatcacttatggcagccaaaggttgttgcagcaaaagatggcattgagcacgattactgtatagaacaactctctccttccttgatctcataggacacaatgccaaagcttcagagtattttgatgcagctccagcaatatttccagatgagaacagggaatttccttcaagcttgacaaccagcgctgcagcctgcttaatatgtagatcttccttgggcatattcttttcccactttaatctctgcttggaattcaaaatatcctcaatctgttctttagtacgactactaatcgagcttcgtcctgacccttgagactggatgcactcttgaagaacattaataatagaatcgccaagctttttatgatcacccagagttgtaatctcagcaaggtcaactaatgtaggcaccactttatcaatcacctacataatacataccaaggccttatcaaacaaagaatcaatttacaatattcaaatgatgtaaactcatagtcataatctctagcaattggtgcttgtataaatgaaagcatcaggccaataaggagaaatttaaaaatgagtaattctttgacacaaggtattgttactttgttagtatgcatctagtttacactttacaaaatcattggtgtcttgacaaggaccagccaccttctttggggacactggtgagggaagtaataactagttttaagtaagtagcctacacatgaccacgagcttgaaatattattcccaacagcaatgtctttagatgttcaaatgaaacagctatacaaaacaaaatacttagcaaaaaccattctttattaccttctcaacggactaccattcttgtattcagaaaccatctcatccagtagatttccctcatcagacctcaactatcaatgaaatttgagaaattgaaaagctttttgaaccaaggagaaatacaaaaaagaggcaagcagtgtgataattctcaaggtgaaggtccatgcctaataaaagtgcttgagattaagcataacagctgttcttaatttcatttttctttaattgaagttagtttaaggcacaagagtcaactttcattcacatgttaatcaaagcattctttcccagacaatagtattccttaatcctcagtgttcatcagtgcaaacaagctcaacagatgtgaagtaacagaaccagatgccaatgcaaagtcatggaagttttaccttgtgacatgtattgggatcttgaagcagccatagaaggcaatcaatagccatatactgccaatcatctgaagaccgagcaatattacacaatgcatcaataataccagggcaactggcaacaggtcccctaccaagcttttgatgacaaattgttcttaataaaccaataccagcaggtgaattttcattaacaagtccaccccacatgccaggtagttttatcagaaattcgggtttgcatatggtaggaagaaattcatgtttaaaagcaaagcaattaattagctgaagggaccaacactgcaactgactagcccattcctcagccttcctggactccatttcaacaccacccatgccacgtgtaagcagatcacaatgataactaagccttctatcaacatattggtaaaagtgtgaataaactatttccagggaactcattgccaattggatggagagctcaagaatttcaccatgacttgctatggctggaaaagtgctggcatatgtagccaagtgtcccaatgctctaaccgccaccctctgctcaacccaagttaatctacctcgtaaaagctcgaccaaaggaggaatgaccccagcatgcacggcactttctgcaaattcttccatattcattgtgtaggaaccgatgatatgagctgcataataaggaatatatatattttggtcatgagaaagccagcgcctgttcttcagtcccttccatatgagagcagacatgcattcgaatattcctagctctaggaactccgggtcatttgggtgtgccatagcggtgttccaaaggccactgatagggagaacctgaccatcatcatcttgacacggaagttctctaaagaatttcagtacacttgctctgcgcttgcttggattcccttccttcatgacacaaaagaagcatcctgggtacggacagtctgatgaaactttatccatgctcgataaattagaacaacaacctcagagatcaacaaatcaattcctcatcgggtagctgaagcaagaaaaccacttcaaaactgcacacatgccatatatcagatcagtaatcagcacccaaaagaccaattcatctgtagttccctaaacaacattagattctcagaaagaataagtaaaaaaaaaaaaatgcaaagcatcgtttcttttcacaaccatttcccatgccctaataaaaatgcccaactaattccacaaatgagtccaaactacataatacaaccacaaatcatgaaaattaaattacaagtcaaaattgttttaagtgcttattccgcaccagcgttaaaagagacaaagaaagacacccacatcatcaaacactttaattaataacaaaaaacactgacttgcaacatttatttttttccttttccatctgaaatagtaagggtaaagaaacagtggttactgaaacagaaaaacccttaaatattctcacatgaaaagtcaaacccagagtgaatcacggaaagagatagggtaagaagaggatcatactacctagctagtacctacaaaccagtcacagtatcaacattcccatataagtcaaccaaattctcaaaaaaaaaaaaaagttatattttgtctttgttgtgttgcggaatcgattacgcattagaaacaaacggtttttccgatggccgaaatcgattctacatgcaaaagaaaaaagtgggtgataagattaccctcgttgttcaacggtcttctgacagtaacgggaaaagtagaacactacacagaagctgtgaagttgtaacggtgaggaggaagagtgtggtggtttcagtgaaacgtcgtttaaggcggagatcggcaatggttgtaaacgacagatccaaattcgtcgtcgtaggttacaactttcggccgttacatgtcggaattcacgtgttcctcggatgctttgtggatttttggctctctccttctcactcacgcttttctcacagcaccgtcatctttgatctaggttaatattccagagagagagagagaaagagagtgagcaacggagaaggaagacaacggaataatgctggggttctactacacactgtactgtactgttcaagtataaattttaaatgattgattttattttagtttttggtacttattttattctttgatggagggagggaaaactaaatagaaatgaaaagaaaaaaaatactaatgaaatattacgacattaatgtctgataaataaaaaattggataaatactaaaatttcatatgtgaaaatataatttgttgatatgtaagtttctaaaagatgaaaaactaaattttgcctcttaatatgtagaattgttaatatattagttatctcattaatttagtctataaagtttaacatctttcttgacgtaacaagtgaggactaaaatattatgagaaaagattactaattgatagctaacttgaaaggattaatttgtcatcaaaatatcaataaaaaaattgtcatctttggaatttatttattcctttcttctttattatttttcttccattattcttctctttctattgtactattgcctaccactatgaaaagatatttctcatgattatttcccttcagtttctccaatcaaatctacaaattcgacaatctcatcatttacccacaaaccaaatccaaaccaaacaactaaccattgatacttggtagtcatacccattgaacaacacattgatcgtcattagaaaataatcaacctaattatgctcaactcaatccccctccccaacccattccttattgtgccaccatttctcattcctccaagctcaatccaacctcattcatatgctcctcaacactaaacatttcataaacaaaacaacgcagggttgtaggtttgaagccttggagaagcgttgctgcacttgtttatgcccttcactgactcaaatgtgtcatccaaaattgcctttcgttgcagcaatgcgcatgacaatggtgatggtggccttgttgggaaggatgccaagggcaaacatgtgacgaaggattgtgggtttgagagaaggttgacaacggagttggatctggcgcaagaggagggtgctaaagttgtgttggtagaggcgggtgttatttgaaacaacgacatcatagtggtaaatcctcaaattcgaccttcaaggatccaactttcaccatttccacttcggctatctttgtttctctttgcattttctttcttctctcttttctcttcactatccatcttattcctcccatcaacatcacctcatgaaacttatacattacttaattctcaaccatttttatgttttcctttcccttttgttatttttcctgaagaatagacaaagaaatttcttttgttgttgcaatttcttgatttatgattttttggtttattggattagtttaatttgaagaaaaatctagttgcaattatatttcgtgtggagaatagcatgtgcaaaggtgtagaccccttaatcaaaaattatattttgtgtagagcatgagattcaatttccttcctcataatttgattttttcttccatcactgcaacatcatcatcattgctaaggtcattgatggaataagttataagagaataaggtgaaagaggagagaagaaaaggaaagagaaaaaaagaaaaagaggacaaattaatctatcaacattttaatgacaaattagtcatatcgaatcaactacctaattaataatatttttcatgacatttcaattttcacttgtcacgttaaagacgttagactttacgaaatgaaataatgagagaattactatattgacaattttacaaatttagggataaaaaaatagtttttcattttcaaaaactcgtatattagaaaaatacacttttagggacaaattgaatagttatcctaataaaatattatgatgttaatataattttttttattttaagacacaatctagtttcaataataataataataaaaaaaacagtctagtgtttagtggcagtgcttggttacattgttatcgtgtcaccaacaaatttttctattgtgattacgtgaaaggaaatatatatttttacaatctcttatttaattaaaaattatgaaatatttaatcctgttttagtagctttaagtttaagtatatatcacaatatgaataaataaagaacttaaatatatttttaattcattttctctctctgtaaaaatatgttttgtttagtctttaaaaattattattgttttactttttgtttttaaagttccttagataatgttttaaataataaaaaatgtttatttaaaatattttacggaaaataatagaacaaacatgatttacaataatttttaaaaaattacaatgatttttaaaaaaaataaaaacactaaattacatatatcaaaaacactttaattcaattatgtatttgttttgttgatagttaggcctacaatgcaacatttttttttaaaaaaaaaaagcaatgcaagattaaatttatttcggtaatctaatacttaaatcttgaaaattaattttgaaaggttagttgattaataataatttttaaatgttaaaagataaaatattcatcaaaataacgaaaaataatttgtaccgacatattgataacgaaaaataatcatattcacaaaattttgggtttacttttacatgataaatttgggaaggtaagcattcatttaatttctaaagttattttattttattttttaaaaagaatattaatttattttcttgatcataaaaatattattagtttagtttttgtaaaaattaatatatgaaaatactaccattatttttttattgtgaatataatttagtctactaataattgaaaacgatactataaattatataaaaaaatggcgtcaaattaattccctattcgtgtctatgatcataagaactgttctaatgttgttaatttttataataaaataattaaaatattttggagaatcaaaatagcaacttatttttgtcaatgtttgagaagtttttttcaaagagctatttattattaaaaaacaataaaatagttaaataatcgaatttaaaataaatcaaaatataaaatcctcattaaaaaatgatatttaacccgaatttacttacacaaaaatcatacacaattcaggaatcaggtggcataatttccgtcacaaattctcaattttacttgttttgtaacttacatatttatatttatccttcctaaaagttttatatataaaatattaacgagttggattggtattttttatggaaaaaaatagggtactacgtagtaacacagcaataattagtttttctttttttccctcgtacattccgctatttgtatgggttgtgtttcggcgtgaccccatcaatggggccaattgcgcactagcgtataattttgaagtgtgcatgggatatgggccaataacattcaaacccacgcttagtgacagtgaagaagaaatcaaaaagtgaaagatttgatttgaatgacacagtacacattattctttatgaaagattaattaatattaataatactattgaatagattatagtagtattttcttctctcgattgatgtgattatcacactgcgtccaattttttagaaaatcacatcaattttaattttgacgtaaaattttaatgaaaagcttcatatattcacatcaaccacacatgttttaatcatttagacgtgtattcaaacatgtaaccatataattatttcaaaaatttgtgcactttatttttttaaccaaaaattgcacacctttcaagttaattcatgtagatattttcctctaaatcatcattcaagaaatggaaaatttaaattataaatgacaaatcttaaataaaaaaaagaagtaattaaaataaactgacaatataagtttttatgctgtttttcactgttagtattttatttatttatatctaattatctatcttgacccgcagattaagcgggtttgtgagttttaaactcaaacccaccttgtctatgaaaatcaactatatcatcatttttattaataacctatattgtcacgtataactttattttgatgcaatgttaatataaacatttatagtcctaattaatcataatatatttacataatccaataagcctgatatattatttaatcaatcaaaattattaagacaacattcaaaacgatgaaaatattgaataaaaaatattctgaagagtagaataaatatatcaaaataatttcaattaaactgttagatttgaaccagtaatgacaatttaaataacatgcatgaaatcataagttctaatttcaaatttcagtgcaactattatacataaaaaagtaaaaagtagttatagtcatttagaataaaaagaaaattaagaaaataattatttgctcgtgttattcatgaaaaaaaagcattgaagatatatcttaaagtttaaatatttttcaatatatttttttctatttttttcatccaaataacataatagaaaatattttttcttctcatagacacatataatatttttttcatccaaataacataatagatttaaatttacatctaattatcacgtattgtcatgatgtctaaaatgtttacttacaggataaatttattaaaaaaatattttataaaaatcaaacaattgtatccaataacttctcattaaaaatatgtcaaattaaatcctaattttacagttttttgcatttttctttttccctaaattattgcaggaacagattattatatgcgtaggtaaccatgagtcatatctgctttggtattttttggttcgaaggttagtggtagacctagagatagatggctagaatagatcctatgctctcttcacgtctctgtctccgggccttcgggtaggataactaatccgtaggtaaaaaaacaaacaaaacaaaaaaagacttacagtaaggtaaactgaatatatgcatttatttaatagtattaattattaacttttttcatatttttgaattgaacttcttttattcgaatttataaaccataaaatgcaatggttttttatttggcaatttcaataattttaaaattaattaaacgaagaaaattcaaatcacattatattaaaataggctaaataaaatgttaagaatgagcaaatttgatatatacattaaattattaagattataaatatttcatctaaaatctagttaactaaaggattagttacagtttctttctttctttttaatacaagcgggacttatgtccaaaaataaattataggattacggaacaggagagagaaactcccctattataaaaaagaagcaaagaacaaagcccagaaagggctaactcaaacaaaacatagctatatatcatgaaaatccataaacatattagcaagagcatcgacagacacattgtcttctaaactcgatttattactaattgtgctcaaataaatatatactttaaatatatgtttaaataaatcatttcatcagtattatattgtaactatatgttttattgtattacttagtatatatcctgttccagtataggaatcctcaaccaggaatagaggtgacctatccaaagcatttgagtatgtgatacatccttccctaggtcagtgttaggattttaatttattatacttcgtatcttaatctgtttctaagagtattgggagtggttttcccatgtcatgggttgattgcctctcggccagcatttatgtgcaagacattaggctaaaattggttggttaatctgggtctcagaaggtatagttacaacccgaaaaggtagtcttggagagaccaatatagagtttggcttagagaattttcatctttaaagagattgatttagagacttccaccttagagtaataggcttatagtacatcagtcatgaattgtgaactttgaagaggtcgacccaaaatctaaaaaaagtacaaataccatatatatatatattaaaaaatttagattaattaattgttaatttgatttctttattcaatatttagtttaaaacatattctaataattgttaatttattaaaatacttttaatcactacataaaaataatgaaatataaaaattaatataatgagaaaagttacaatcttaaggattttaaaaaaaaaattgttaattacagagactaaagatattaatataatgattaatgaaacgtaaatatttaaacaactaaaattaagtatttgttcaaatatcgttatagaatttaatcactatacaccaacttggaggagggtttctttacgaaaagtgtcagcaaattactactatgactttatgaggctggattcaggctgttctgtcctaaataactgaagtcacttttccaaactccagttggttacattaccagctcccacaaagccagtaaagttaattaaataatcatataaatcatgtgctaagatattaacatattggtgagttcatttagaatttgtttattatctacacaaatttaaatactacagtactacgtatttatttgcatcggtggaactaattacccgtaacgggaacaactgccttcactatactaacatttttaaaacttacaagacacggttcgtttccaaaacatgttgtcctatgctttttgaaagaaagctctataattcttagatcaatttttaacttttctagatttggttttattagattaattttgtttatactaaatgcaaaaaatttacaaaattaatccactaacaactactgttctattataagggacgctaacgtgcatgtcataacttgttttgatttttttatcaacctaaggatgctaatttcgttgaatccttctcattctcataaatagaaaaaaagtatcttgacatgtattagttggacgttctttatcttcaggcttttcatgaatcgagatcttccgcaattacatatttaactgggtaaatcttaatattttaaaagatttacttttatattaaattgaagcagaaaatttccttttaatactcatcaccgtcatttcagaccaattatcaaccatagggaatccaattcgtgaatttcggctttttatactatcctttgtccaagttgaaaattttcatgcaaagaagtcaaacagtcaacactctttttattaactgaaaaataaaaatataaaaaaatctttgctaataaatactctagtctaatttaattcgaataataagtaaactttgcagattctgtttccattttccaggctcaaataagagagagtataagaaaagataagctatgttttcatctaaatccggaggcatgaaactgctgttgtcatgatgtacgtagtcttatttattgaagaagcttgcaattttgccttttcttttttataaatttaattattgaattgaatcaaatgaaaataataataataataataataataaataaaataaataaatacaaaggtatcttctcaatcaatttttcttgccttctcctccaccgtcttccacgtaagtctttttccttctatcagctctggcaagcacacagatgagcagaaaacacgtggcgtaaatggcgtggatcttccaattggtcttgggcggttgctgcagcacgaccctgtgaaagaccgtgacgtagtaatgcagcccaacggcaaagcccacgaagacctgggccaggcccaagaacttggaggtcaggccacagtccgtggagaacacgagcacgaggtacatgaggagcagcagcaagtagaagacataagcgagggtctgcagcacctgcaggcacagatacgtggactgcgaagtagagtatagaaacctgaggggttcgaagccggtgaagaacgatgtgacacagagaatagtgaagtagatggagagatagacttggatgaagattaagatcttctggagggagaaataggctttgatttttgtgcagaggagagagactaagaggagagggatgagtatgaaggcgcaagagataatggtggcgagggtgggtgcgtattttttgccaacgtagggtttgaagcctttggtcatttcgttgttggctttggtgatgtaggctttggaagtggtggagattcgttccaggtcggggaggagtgtccggtggaacttgttgggtagatctgtgaactctgaaaccaaatcatcgtcttcctcttccagctcctccatgatccaactcggtggtgctttttgtttcgtaggtttcttctgagtttgttgtttcttgtttgttgttgttgcgtcgtgagtttgatctacttttgttgttttggcttgcttgttggtggcggtggcttttgttgttttgttagtaggtctcgcgagatccaatgctttcttgttgcttgaaatggaaacggtggtgccgggttttgagggtgggattttgatgtgacgttgagcttcttgatcttactattgagcttcttgctgaggggagtgtcggtgggtttggttttggaaggtgaattggtggagctaggcttgagtggcttggtttggtttttggttttggagaaaatgttgttgttgggtaattttgtggttttggtttggtttttggaggaaacgagtttggatttgatggttttggtttggtttctggaggaaataacgttgtcggatttgatggttttggtttggttctttgaggaaatactactggtgggcttggtgttgtttttggtggattgggtggtggttttctttttcaaaggcttctcttgctcttcttttccggcatccaacattcttctactatgttgaggttccaaccggcaaccaggtggcactgaagcaaacagaaacagaaaggaacaaaagaagatagaacagtagtacctttctgtgattgagttgagccattggtatcctggaatattttccgtcaagcaagatctacaaattaaacagaggacgctccctaagatctagctatatgtagtaattaatacatatatagaacactcacatgcgaatttaataatcagatttcggaagagagaggaaaggaagggaggattttatagtttttatgggtagtgaagtggaaaatgaagtgagtgagagtggaagtgtgtgctgccaaagttggcaggagaaggaaacctatcacatggcgcgcatgagattgtggaatttcactgccttacgatttattattgtgttagtttgtttaaatttatttattaaaataaatatttatttcaataaaataagtaaaaaaaattattttttagtatatttatctaaattattcctatttagaaaatattttttcatttaatttaaaaaataaattctatctatttctaaaaaatatataaatcaaacaaactcaccggttatctgacccgcaactattgctgcctcactttctctgtcttaatctctaccctacattatgttatctctcatctccaaatactgtgttagagaccattcaacgggtcagatttgactgcactataagcctgctggagaggatcccaagtgctttattatttaggatactctcttcgaggcgtcccatttttatattctggataaaataagtgaaaaatcattcacttgttcgagttcagacaaattcatagatcatagagttcaatactaaaaaataactcattaatttcagtaagtttgttacccaaaatgcccacaaaacaaagaaacaagagtaatatactgacttaggagtatactttaattaactcttgaaattataaaaatcttattttgaatggaaaactaaattggattaagataaatgtcaataacacgtattttaatatattcttttaactatatatgtatatttaactgagatttattcaaattctcgaaatgatgtatttcttgtactccaaaattataaattctgtagactttttctttaaaaaattataactttttcagtcacatttctcattcatttaacaactgtatggacaattaatttgaattatgtcgactaaaaatgaaatgtgaaggtagtaggcaagcgttagtcacaatatacatcaattaataatttcttgatttatttgtagcagggaattaagagaatacatttttctttatctaatgaatcttacttataattttcaaaatatttaactaataataataataataaaatatactacaaatgcggtgaatattaatgtcgaggttgacgtcagtggaatacgatgcaatctaataaatgtttcatagatgctgaactgcctgaacatatatggaacgtgagaagggaacacatgttatcattgttatgtacgtatcattatacagtactactactatattagtaaaaatgtacaatgattataaatggatagatagtttttacatttcctataattaacaacaaacatcccaaaatcagaaaaaaagaaaaacaaatatctcatatattatatttataatgtaagaaaatataaaaaaatattatttttaataatgattgatacagcttataaggattaaattcacatcttatcaaatgtgagtttaaatttactcttaaaatgagaattttattatgagtaatacgtagatgcgtaccaattgtttaattcataaaatctaaaatctcttcagtcgttgattctcataatccaattcatctatcttttttaaaataaattatgtgtattattaacattaacaattacatttacgctaaggtgaaaattaagcattacaattatataccttacctatccacatggtaacaaatcctcctatatctcacttggtgagtttacgctgttattgatgcaaataagaagtcttttaataaaacgttatatcttaaattaagaaatttagttttttttttttctttctataagtatgtttggtagtaagaaagaaatatgaacaaaatagaggaaaaatagaagcgttagatttaagagaaaaataggagagaggagtaaaaatacaacactgacagttaaattatgaattcttcgtaattgattatcagcagtaaaataactattttaatgtgtaatgacattgataatcaattatgttttctttataatctatcattagtgacgaaagactcaagcattgtgcaatttctattttctatgcatatcaacaaggaaataataaaagtgtgaatttcaataatatcttttttattttgccacctatttctttccctcgatcttatttctttacaacttaaataaaaaatattttgagatgatatcattaattaaaggtgaagttagttaagatttattacatatgtttttttccttcttatatttaaatcttgttaaaattaagattgaattatttagataatactttaaatttagtcttttaatgaaaataattattgattagattttatttattttttgactgaatttcggattccttccataaatcaaaggaggattaaaacaataaaaattttgttaaggagagtactcatctattattatacattttattcaaaaaccaattaaattttccccttctccattttgtgtcatttgtacataaatatttggtattatataacattcctgtctacaactagtgctaatcaattcatcaagataacctaattaacaaaagtcaaatttatagtaaatatctcttatttcctttaatacatttttatttgtaaatttataaaattgatttaaatttaaaaatatccttacaattcacagatttttttttttacaaacgatatacacacgtaggaaactaaaaatgttaagcttaatagaaaaatatcaattatattctttaatgtatttttatttataaatttgatttaagtttaaaaatatccttacaattcacagaagaaaagtttacttattaaaacgatatacacgtgggaaaaaaaaaaactaaacttccccagccacctcaggaatcaggataaactgttgaatttagaagacatataatatatctttccgttattttcaccaaaaaagaagacgacatatatctagcacctgcccagagtgactactttgttgaacttgattaatgtcgacttctcacatgtcacatgagacaatgtgcagcagtaaaggatctagcctagaataccctaacataaagtgaaatcaccatgctaggtgctatgggattttgacttttgagacctcaagagtgattgaatatgatccatttgtcaaaaaatacatggtatcaacagtttccggagtcacctaacagataagcttcacccctgtttgtctaattacgttgaatcaaaaaagttatccaattccccccaatataaaaaaaaaggttatccaacagtaaacattataacatttgatcaattaaacaacaattttttttataacatttgataaatgaaccattgatgccttgcaaaagtgaaatactaggacaacaaaactttcttatcatcatcatccacgtcgacgctctcttcccttgttggataatcaatgccaaacttgctactttccttgccattcaccacatttgactctaaatattcatgaatttcgcaatattcttcttttgtgccatcttccacttctagctgctgcatttctgattcctctaatgataccattcttgctcgttccctgtcccttggatacgtgcaataaagcaatgaatatacggagacgcagattgacataggtattagaattgcagtataaagtgccttggcgagagatgcagcattttccctatctgtttcaatctccacagaatctgaggatccgcttgggattggtttgtaaccataaacacgctgagccaatagtccaacaataggtggagcaaaggatgccaagatggactcaaaagaacaatccaaagcatatatagcggttcgggacttctcagggactatttctgcaaatattggactgtctacactgttacatttgaaagaaaactaaacaaggtgcattttaatcgatgttcaatagttagctgcaatttgtttactttggacagtttgtttagtttgaaggtccacatcttgcaggctgtatcaaacaatttgtttagtttgacagaaaaacaacctgcaaactgtttttcttgcatatatgtatctctactggtaaatgtttgattatggttggtgattaatgatctaaatagtctacaacaaccttctttcatactttcattatgcattcgtcactattcactaattttggaacaattatagatggatcattaattaatcactgttaaagttttattctgacaaatgctgctagcatacctatatagaaaaggtagcaatcattatacagtcacaggttcaggagattcaccactccctcagctaagaggagtaagagctaaaaagtttaaaaatttgtttgactcatcttattgggtgtttgacctatcaaaaagttatcatatggtttgggactaccttgccatggtcctagttaatttttacctaataagtaatcgagtttttcaatctaaaagaagagttaataaaactcgattatgtgtcatgtggagattgactaggatcatagtggtccagaacaaggtaataatttctcctagtgtacccgggtgcctcaaaacacttctactaattccaagatatatttggtattaagggaggccactactagtacaagaaatccttacagctttaaattctagtaatcctgaatataaagaacacagtcataaactattgcagttatgggtacgtacttgttagttgctggagcattccaggctgaggtgaatcccatgatgactaaaacaagaccatgcatgaaggcagtggatgaatcgtcgggcaatcccaagagcaaaactgctgctaaaggaatgactgaaccagcgcttatttgtgacaatattattctaccagagttgggtaaccgtagggataaaaaatctcccatccaccctccaaacagagacccaaatgaagcagcgactatgaatagggtccaaagggtcgctgttgtgacatgggagaaacctattagttctaaccaaagagtggcaaatgacaagcctgaccaggggaatgatccaaacactccctgagccacaattatctgaaaagttggaattctaataactgattttgcttctttcattagatctttcatttcagaataaaaggacttgtttcgagcttgagttgttgctgtctcatcgcgctttgaatagtgtggatcgtcagcaaagaggcgcaccaatatacccactataacgctgatcaatgcaactagatgaaaggctattctccaaccaggtatacctgcaactgtggttgaggctataagtacagataagagaccaccaatgatgcttcctaagtttccggttagttgcagccacccaaaagccataccacggttgctatcaacggttgaatcagcaacaagggactgaattgctggaataacaatggcaagtcctatcccatttaaacctcttgaaattgccacctgataatccatattgtgcaacacgaaggagtaaggaaacatgtaccatgattcagggaaaacatgggctaagaaaacacaagtatgagtaacaatgcatatacaaaactataattttgttaagcaaacgatcatgatgtttgttatttttatcttgttgtatattttgaattagtcatatgatcatgcaaattatggtcaatcctgaaagttaatcacagaattttatgttaagtatcaggttagggactgcagaacttcacccttttaaatgagcctatccaactttacttggatgaatctcaatgtaacttttaagagtgacatgcttattatattccattttttcccaatacatgcaaaaaaatttaagaatatttttttttatattatcaagtcaactatatttaatttttatataaaaattccttttttcataatttatggatgattatattataaaaactattatgtttaattatagattataattttaatccacccaattttcttttcaagctctcagccacttattagagtatattcttttaaggatagcttgaattagtgtattcttccttttcgtttttattttttcttttaaatttaaattctcttaagttaattatacatatttttttacaatttgattttttaatacatatttttcatatttttatgaataaattatacatgcttgccttaaacattttgaattaatttatttatacagttaatgtttacatgaatttaaaaacacctttatgacgcacaatatttatgagtaaactaatcaccatattattataatgtgaaaataagacatagacacaaattaaaattaatgaactctaaatgcactattataattagtcttgcgtctttatctctcgtaacattactttatcgtgttaaaataaataacatgagattttccaaatttaataattgagtgaatttctaaatccaatcgataaaatcatttttaattttaataattcctaacaaaacctaaactcattctttacttagtaataactatcaagtatatattaacatatattgagtctaactgctgtttggttttctttgtaccctttagtgtgagcactaggtaaggcttcgtttaaggttagtagtgttttggcgtgcggctggtttggttttaaactgctacatgtgagcttacaatttgtattgctcttctatcaagctaaacatgccttatgtttagtttgatttttaatgaatttcagttttagcttcttcaaaaaaaaaagtattaacataaattgattagcagtatagttatctaatcctcacgcttaattatctaaaattgaaataacaatgttatatcatttttatgtagtttttataagaataaataagaaatatatatgttatacaatatttttttttataaaaaaaagcctataaaaatgtgatctttaactttcttctgaagaaagaaatgtgaccttgaattaatcctttatgaatcataataaaaaagaaattgaattgtcttggctactaagaagtgaaaacatgttgaatccaaataagaaaagcaggggtaagaacctgaaagaaggtggaggagatggcgacgaggaatgtagcagcagcccagagaaaagcaccgagagctatgacatgtgcacgattgtgacgcgtggcgaggtaagccgcgagagggtaacagagagactgaacaagtgatctgaagagagtcaacgaacccaacgcagtggggtcagccttcagatcctcaccaacctctttgtacactcctggaagcaacgactcatccgctctctgcataatactcgccagattcaccagcaccaggttcactgtctccgatttcattttcacacatatattcaaccaacaataactcttctcacactctatttctccacttttcacaacccaataacacaggaattcgctgtgcccttggatggacacatggatgctacggtgggggcaacacacaggatcggaactgtgggagatgatgagcttgccttgcacgtaattccacaaaatgttgaacgaacctcactggtttattacttttatatgctgagcttggtttatacttgaggttggttagtttagctgttgctattttcaaaatatagtaatgaccataatttgattgatgggttaacattaattacgcattgaaaatgtaattttttatataattattcaattataatttattatgtattataaatttattgatttttgaaataattatttaaaaataatttaaatatgatttctgattgataataatataattttttatattttttaaatattaatttttttaaaaaattgtaggatacatgaagttctaaattcacaaaatatatgttattatatttgctcgcatttgtctttttctggcaaagatcctgctggtccatgtgccggtatctatattatatagttttttttttaggttatcaagagaaactaccttagaaaataagttggacgactataaagaattaacaagtttatggtccttttatttatttaattaaaaaggaacaagtagggcggcatacttttctttttgtttgttttttatgacgtaattggtatggtatattgtggcagtataaataatttttttttcttgtttttttttagataaggtcctaaaggccgaaacatagaaaaataccgtatttggctaaagcatcatggatcgaattggctacatgaacaatatgtgtccacgagatagattcagctatatggtgaatgacttgaatcaagctgtgccaaggataatgtgagagttttaatcaaattaacggtaactaagtaacttgttgggagtgactttcaatgataatgcttcttaaacatctagaaatggctacttaaacataacttcaatcgtgatacacactttaggtcagccccgtgcttgatctcctctcattgaggttaggatgcaaccaagagtgaaaatcaagagcatacttcttaaacattattaagaacaaaataaaaattataaatcactttctattctctacaaatagaagtacatcaacttcgttcctttttgagatcattcatgatacttctatatggagtaagatatgtgtgaaatacaaatacgtggagcaaatgaaaatatcgatgcttcctatatttcacttcaagtgatcttgaattatcaaatgaaaatgtttctatatgtgtatgaacctccgtgttcccgctaagtgaactaccgggacaacaaaactttctcatcattatcatcctcttaccttggataatcaatgtcaaacgtgccactttctttaccattccatttgattctaaaacatgaatttctcttcttttgtgacgtcttccacctctagctgttgcgtttctgattccactaatgcatccattctcgctcgctccctgttcctcgggtacgtgcaatatagaaacgagtcgatggaaacgcagagtaccgaaggaatacttattgcagtgtaaagtgcattggcgagtgatgcagcattttctctatctgtttctatctcaacagtaaccgaggatccttttggaattggtttgtaaccataaacatgctgagccaaagctccaacaataggtggtgcaaaggacgacaatatggtctcaaatgatcgatccaaagcatatatagttgttcgggacttctcagggactatttctgcaaatattggaatattcacacggttcaatttcaaggcaaactaaacaactaattaagtgcacataatgtaattgtattattcatataacattttatacaacactttctgcgtctatttctttccatcctatcatttattactccacatatttctcttagttgacatgtacaaataacatttctctaatgtaaaccctctacaactacctccccttttaactgtcattttgcagtcatcacaagtttctgggccattatagatagatgattgattaagtactgctactgttctgatcgctgctagcatacctagatcataatggtaactaacacagggcatggagatacaccacccccaatccaattaacaaaaaatgagaactgaaaattcataatgtgtttctaatttcttaaataatggaaattcataatggttgtacatttcattttttatgttgcatttatgtggtgccttggtgcttgtaaacacctatacaccgggatttatacaatggttgactgaattacgatttgaacatgccaccatactcctaactaaatatctttatgctcacttcaacaacagggccacaacattatgcacaaaggtagaggcaaaacataatattaagcaacctacctttaaatacaataaatctaatctcttaattggtttcatttagtcagcatctctcccttgggattcgttaatttgcttaacaagctatgatgaaataagtagcactcttgctgtataagacaactttgatttttttatttatatatggtaagcactcaattcaacatagataatccatcatttaactttgaaagattattcgtaacaccctcatcttaatgaagattatttattttataaaaaagtagattatctaaagcaaatacgatgtgttttatgttgttttctgaagaaaataaacaagtacagtgttggatatacatacttgttagtggctggagcattccaggatctgattaaccccatgaaaaataaaagcagaccgtgcatgaaggccttggatggatcataacgcaatcccaacaacaaaattgcagctaggggaatggctgaactggagtttatttgtgacaactgacaacaaaattctaccagagtttggaaaccgttgggataaaatatcccccatccttcctccaaatagacccccaaatgaagtagcaaccacgtatagtgtccaaagcaatgcagttgtgacgtgggagaagcctattagttctaaccaaagagtggcaaatgacaagcttgaccctggaaatgttccaaacactccctgagccacaatgatctgaaatgatggaattccaattactgactttgcttcattcattagatctttcatttcagaacaaaaggacttgtttggagcttgatatgttgttgctctgccatcgctctttgaaaagcatggatcattagcaaagaggcgcaccaatatacccactacaacacgaaccattgcaacaagatgaaaagctattctccacccaggtatacccgcaaatgaagttggcgccataagtacagaaaagagcccaccaacgatgcttccaaagtttcctgttagttgcagccacccaaaagccataccacgattgctatcaacggtggaatctgcaaccagggactgaattgctggagtaacaagggttagtccaatcccatttaaacctctccatattgcctaattatccatgttatgcgataagtagaagttgcaaaatatatatatatatatatatatatatatatatatatatatatatatatatatatgagtgtgtcttgtgtaattaatcttgttataattctatatttctagggattactatttttttagaagtaattgaaatttacataataaaaaagagaatcattaaatgagatataaaactcataaaaattatgatttttaataaatttcaatcattaataaaaagagaatcattaaatgagatataaaactcataaaaatttatgatttatttcaataataaagagtgtattgaaaagaatgtgtagagaatgttgttaggattttttatttttttttccacaaatattacctaattcattaaatcaaaattaattttgttcgcatattttgtattttattaagtttttacggaaacacaggaagactagtactgtttaatagaatatatttacaatatgtattcattaaaaaattaaggataaaaagttgggattttcctttcaaagcctgtattctcacatggatatgtataattatatgtaacagtttcaagagtgaagatcgcatctgatttgaaaattcttacatgcgatgatgaaaactattcagcttcgtcgataaaaaatattatatacaaggaaaggaaagaagtgtttccaaaaatctaaaaaggtatgtttcttttataattttggtatataatcattcaatatattatgtttgttggcttgattcattaaagaaataaataccctggcaacactgggtcaggagaggacaaaatgttgaaagagaggcgaggagatggcaacaaagaatgtggcagcggcccaaagaaaagcaccgagagctatgacatgcgcacgattgtgacgcgtggcgaggtatgcggcgagagggtaacatagagattgaacaattgttctgaagaaagtgagtgcgtccagagcagcaccaacctcttggtacactcctggaagcagagacttgcctgcattctccataatacctgccagattcaccagcactaacgtcaatttctccggtttcatcttcatgttcatttttagattaattactgttctgacatgttcggtgtttaagattcagatccaagaacagaggattttgccccgtctttgactttggagaggagcggagtacaacgtgtgggggagtgtccggttgacttggatgaaataatagtctctgtaagtcagaaatatcatgctcggagtaaaattaaattatgggcacaaactttacacgtcattcttgaaaacaatctattaaaaaaaatcacacatgaaacctggaaatacttgaagagaggaacaaaaaatcatttaaaatttgatttaggttgcagaattagaatagtggtttgcacgtatattgataggcataactattcaataaaaatgtggtttaacacagcaacccgattgggtgtcggtggctaatttttgtgtccgatgggtggaaccaggtttgggtggtactgtgggcgtgcaatctctgtctggtgttcatttgttagtggcgcgcaatctcaaaagatgattagattctgaacgtttatattaatcgtttgataatttggatctattaaacaaattgtagtggctatacacacatgcagaaagtattaggtaatttcaggaaaaagtattagataatttcagattttttttaaaaaaaaatagtgctagtacttaatatttatcatgtaaatattaataggcatcataacaatctaaaactatttaataatttttccaaatttcagtgaagcaatcttgaatcggtgaacatgaaatcttgatatcttccattcttcattcagcatcactttccctttttttctcattcgttagaacactgtttagtttccatttctatgtttaatcacgcaaaaaccaaaacaaaaataaaatacatccaataagaagaccgtacccaacaaattaagctgagaaaaaaataagacagagaaggaagacttcatggtttaattgaagtgttagccatgtttttttttttcatcatccaatcaccgctacagcaataagatacatatcccaatcccatatatccaatgctcctaatcgttaattaaccaatattctccaattaatgaaattaatattgcttgaatttggtatcgcattgctgtgacaagactcgagtgtcgttcccgagaccgctgaccgtaaactcacacgccacattggacctcatggcccacgtttcgagtcccgcggttcttatcctcatcgcaagtttcatctccaatttcaaatccacggctgcgtccccaccatgcattcgcccgggcaacgctccactggatccggtcagttcaaccgtaacctcactcgcctcacctcgcccttgctccaacgtcggaaacttcccctcggcaaccttaatcttatcgaacaacagcgacacgtccccatcctggtactcaatcgccaacttctcgttcggattcttcgccctcaacgaaacctcgtactgcggcgccgccggagagttcttgttcctattaaccgccacatgggagacagtaaacttgggacccgaggggttgaaaataaagtacaaagtggccagcgtgatgccaacgacggcaacgattgccacaacgataagagcggcggttaggaagacacgacggctgcaacagcaacaacaaccgccgcgtctttttttcgttgttgccgggttgcggtactgttccgcgatcaacgcgttctcgcgcggcggcacgcggtacacttggtccttcgggaactgcacgatgtacgtgtcggcgccgtggcggccaggaggaggcggcaatgcggcggagacgtcggcgtgcccctccattggcaaacacgcaatcgcacgccggcacgcgcgcgcgcagtgggaagaagaatgactacgcggcttcttcttggacgaattaacgattgcttgcattcgaagagaattagtttgggggcttaggggttgtgacagcgtggaaaacacaaacgcacagcgcatgcatggggatattttgttatttcttgggacttcatacagctttgttatgacgggtgtgtttgtctatattggctctaattcaaggttgttaacttttgattattaagaaccgttatgacatgattagttttctgaactcgtctatttttagtgcgtataagaattatgtctgtttttgtgctttgagtgtaattagcatacttgtaacaagtaataactacaaccaaaaatgatgttgtatatatatgtcaaccacccgtccaactgccaattattaattttcatgttcatgcactttagcaaaatttaaagaaaattacctatttgattttcatgttcaccttatatattttttaccactttatttttattagctttgttctctcttttctcccaaaaacaatctaatatagaaatgttaattaatattaatcattactaaatgatggttattttatttatttatgttaattacgactttatttgccattcaaaaagatctcaaaaatagagtgggtgtaattttcctgaaggaatttaaccgtgcatagtacttatcatatggaagttcaactctaaaagaatcaaattgaaataaaacttttaaaacttaattaaaaaatcaaaacaaaaaaaataaaacataaaagattaaaatgacatttagtcaattaagaaccctaatatgctacaaaacttggatagaggttttcatgacttgaaattagcttgtaatagaggtttttgatatatcattgtctactttgattcttagatagtaatgaagtcgttgtcaattacatccttattataattaacttactgagaacaatccacaacatcatcagtatagaactcatgttcatgtggtgcataagacaaatcaagtagttgatgttttagcttaagtatgatttgtgtctttggtgtgatacaatattttttatgtggctcctaatttcatttctaacgccttgcatgttgatatatgtcttgtattaattttcctataggcttctaagcctattaataaagttttcatttagcgaaagaaaaattaacccacacaagttcatatattggagtcagacaccaaatactgtcatctaaatttattttattttataaaaggtgataaattcaattatataaattgttagttttatttatttttcagcactttctttaaagtagcactttttttcatcagcacattttaacttgcattgttcttcatactcttctttctcaaatttccttttaaattcaattttcttccattttcattgcacatttttacaattttttatttaaattgcttttaattttaaacgacttacttttaatttctctttcctctctgaaactatttagatttctgcatttttcaagttgttttctttttctgaattgacattatgcttttgtgatttgagtcttgatttttcttaaagatatttctcaatattgcatgttatctcacgtaccagatattagaaagtacaaatagtttaaatacgtgtattcaaaaatttaaaattttcaagttataattttgttccgatgtggaataccggaaatgtccgacgagtgtcgccggaagagttgctataggatcggactctcccctgctgatctatggtggtgagaccagcgactgaagagaagatcgcactgacacgggagcaattggggtgctgtgtgtgccgtgcgaatggaaagggagagtcagaaaagtgtaccttgagaatgtctggagggttgtatttatattgaatgatgggccttggacctcagctcacaaaggatctatttacagacacaataatgggaaataatggcaagatatgattactggaattagaattattacatacctggtaaaaaaggatccgattaccaatcagatatccgaattgattgagatagattctttcctttccgtaacagatgccccccagctcggttgattagcattctgatctgccgagctgtactaattacttactttcctgagacgggcgaatgaatcgtttttgttggttaatgtggccgaggtgcatgaatcttgttgattgtcgtaatcgaggtgaatgaatcgcttgagttgcaatgaccgagatgagtgaattacttcggagtttgtaatggccgagatgaccgtttggtgtcgggacctcggaccttgtgaagcactgagtttcgacttcgtatagggccgacctcgtatagggccgatcacgtggggaactgatcttgttggacccgaccttgtgcgaaaccgacctcgtctcggtcctccagtattcttgatgaccgggatgtacaatggtttgatcagtcctttaactggtctcctatgattgagactttcggcccgaccttgtatgagcaagatcgacctcgtgtcgagccgacttcgtataaggccgacctcgtatagggccgaccacgtgtgggggatccgagccgaggtagtcgatatccgaggtaaggtttgtttttgccccttgccgaggtaatcattgttgaggtgcgacttttgcttttatctttttgccgaggtggttggtgtctgagttcgcttttgccccttttctcattgtatctcattctggtgcttttatttgttctttgcttctgcgtctttttcattctctttctcttttgcgtatcgtggctccaattgtcgagcgtctatttggccgggaccaatggtcgggctctaaacatagttggccgggatcactggtcgggctctaaacattttggccgggaccactagtcggactcgaaacatagttggccgggaccattggtcaggctctaaacatagttctgggatctttttcccgacttagcaactgttagcgtatttgtaacatcattataagtgtaattctttcggccgacccgatgattcacccatgatagttacgtcggcttgattaggaccgagataatacgaaacaacgactaagcattcaaatctgtgcacagtaattttcctttaatcaaggattttattaaatttcttcgaagattacatgattttcatgatctcaacgactgatcacacgggttgtaccttcccgaattatataatcagctaaagagaaacacatgatccatcagttataaagtcctcccatgaccccaatggcgggcttgacagccaactaaaggggaacacatggtaaggcactaatccatgatccctatgacgggctcctcggccaattaaagggaaactcatggtgtccacgattccgatgacgggcttgcagccaactaaagggaaacacacagtgaagttctgtgatcccagtgaccgactaaaagccaactaaaggaaaacacatggactttctcggctgcgtccgtttgacttgcttgtcgtccgatgtcttcattaagtatgctctttgcccatgattttggacaacccagtgcggttctttctggcctgctgctaactttccttgcaccttggtcggtctcttaccaatattacttgaggtatttcttccgttggttggttgtcgcctccttctcctattcctcccatgatgacgttgcattcgaactcgggctctgagaattctttgtcttccttgctcctcttatcatctcgttgtttattctcttgctgggcttttctcttcccgttgtgtccttgagttcggatcacgtactgtcgcagtttgccttctcgcacaaatttttctatagcatcttggagctcccagcactggtcggttgtatggcccggtccattgtgaaaatcacaataccgggaatagtccagtccttctttccttaccatcggaggaggtcggttggcgctcctcatgttagtgaaggcgacctccttccatatttggccacgcgggacggtcaacggagcgtaattgtgatatttcaactcgtacccctcgggcctggagtgagggtcgggactgctccgtggtggtcggcctacttgggcatttgctggatgtcggctggacggtccgaccttgtaattcttctgtcgttggttccaaggtgaggaaggttctttgtttttccctggtgctgagtttgcgatctccatttgttctaactccaaatattttttagctcggatcctgaactcattcagggatttgaccgggtccttgtagatcgacttggcgaggcgggacgttcctttgagcccggcggaaatgagatggacgtgtactttctcctccaggccttgtacttgtagtgcggcttccttgaaccgatccaggtaactttgcaatgtttcttcgggctgctggcatatcttgcctagagtgaattctgacttcggctgtttcttgctggtcgcaaaattcagcaagaacttctggccgaaatcttcaaagctgtgaatggacctcggtggtagggagtgaaaccatgtctgggcggcccctgttagcgtggtggcgaagattctcgaaatgataggttcgtcaatgcctcgaacacacatctgcatgtcaaattcgtcaatgtggacctgtgggtcctgatttccatcatacttggacaggaatgacccgtcaaagtcttccaagaactgagcgttaactatttggtcgatgaacgggctattgttttgatgaccccggcggtactttctccgatatgtgccatcgccttgatcaagtcggcagatggcctctattggtccccttgcagcgcgttctgttatcgtagtcgagacagcacagaatgccccttgctgaggacgtgatccctgcaatggggtggaatggtacgtcggttccctattgccggtctcggcagctcgggtcggtgttccgggcctttgtcttcttgcattatgctcctggtggtcggtattttgccgacgttcttcctctcttctcttgttactgcgttcttccaactgggcgatgaggtgctgcctatcttcttgccgctgaagctcataccgtttctccagattctccatccgggccaacaaagattgtaaggcgttttggataaaacgttgggaggtctctgggtcgtcttgtgctgccggtggtgtattggccggcacatgcgctgctgatctcgtacgggaggaatcggtgtgggacaatgcaccctcttccaccccattctccgaattcggattcctgggtggttcttcacgtctggcgagctggtgtcttctggtattagccattgatagttggtgggattcgaaatttatcgtccccacagacggcgccaatgttccgatgtggaataccgaaaatgtccgacgagtgtcgccggaagagttgctataggatcggactctcccctgctgatctatggtggtgagaccagcgactgaagagaagatcgcactgacacgggagcaattggggtgctgtgtgtgccgtgcgaatggaaagggagagtcagaaaagtgtaccttgagaatgtctggagggttgtatttatattgaatgatgggccttggacctcagctcacaaaggatctatttacagacacaataatgggaaataatggcaagatatgattactggaattagaattattacatacctggtaaaaaaggatccgattaccaatcagatatccgaattgattgaaatagattctttcctttccgtaacaaatttcaaattcttttaatagattccttcaatttaagcaaccatcatagatatttctaataatatactaaaagtagctagggactcattcagagatttcgataacgtgaaatcgtgcaaatgtgtcattttatattctaagaaatttttttgtgtgagcgcgtgtgaaatgtgttattttattattctaagatgaaacatgttgtatggttggtacttggtatacatccagaaacctattaaacagggattacatttttttcttacttaattgtttaaatttataacttttgataaataatattttttaaattactatttttatatataaaattaaagctaatttttattttaaataataataaccttaatcatcataaaaacaataaatacataattatattttatttatcatctaaatcagtatgataataataacaaacactattaattttatgttaactacattaatcattattaaaagtattataataataacatagataattaattttacacaaatttacattaactaagttaaatctatatacatgagaaatgtcaagagggggctgggcccttcccgccctcctcttcttcggttcatattggtaaataacattatttttttaaacatataattatggattcaatccttgattgatgtgtataaaaaaagcatccataaaaaaattaatcctttaaatgaatctcaatatattaataattacattttaacttttgattgaaaacacttaattaacaccaaagaaatatagaaatctagtaacaaaaatatagaatatacaaattagacatgcatatataaagatacgcgtgtctcggaagacttcaaatgttaatttaatttcataatccataaataaacactgatttgagcattaaagtaatatataaaaatgttaaaagatttaaattagttaaattataaatatgaaaaattacactttggttttataagacatgtttaaacttagttgattgatcacagaacttacatttttatgatatatattttaatttttttaaagaataagtttttgttcctttgtgactcaaccttattctaaagtcgttttcaatttatactaataacactttaataataaaaaaaaagatatttgttgtctcaaaactaattgtagaattctttaagggatgatttggttgtggagaagaagttattattcaaggaaaattaattttaaaaataaaatagatctcattttttttctttctattttaatttaaatatttttcctatttctgttttctttttctttttcataaaacgaaacctagcataaatcttgatgtattaattttgttttctaaaacaatattcaaagttagttgatgttaaaagtaggactagaatattagatgaaaaaaaataaaaaagttgaccggttgttaaaaaaattatggagcaaaataataaataaataaataaattaaagaagaaaaacatatttgattgttttgattagtatgtgtaattttgttaggtgtcttgcgttaacgacttgttttggtaagtccggtatagaaatttgtatatttagaatgcaaatctgatactaattaatttaataatttgcttgaggagaatgatgaatcatgtgtccctcgctggctcgctctatttatcaatacctatggcactgccctcatcaccacttggactcaaaaatggcatctgcaacacagagtctctctctcctccttctgttctcactctgcatcgccgcaaccgttagatcggtaagaactcgctgttctccctccgatcctctccttctactaactcataacaaaaacatcattattcatacttttcaggatctcgttaatttcataatttgtgcttactactaagctttgaaatccaatataatgcagagcgacagcgaccaggattgtgtctacacggcctacgttagaaccggttcggtgttgaaggggggaacggactcgaagatcgggctgaagctgtacgacaagtacggctactacatctacattaaaaacctcgaagcatggggcggcttgatgggcaagggccacagctacttcgagcgcggcaacctcgatatcttcagcggaaggggaccctgtcttaacggacccgtctgtgccgttaatgttacttcagacgggtcgggttcgcatcacggctggtaccttaactacgtcgaggtcacctccactgggccccacctctcatgcgctcaggagcagtacgaggtggagcagtggctcgctctcgacacttcaccttaccagctttgggccgttaggaaccactgccgctacagcttggatcaggcccgccccgtttcggagcgacccggatccggatcctcgttctctattttgaatgcacgtgcttgagtgtatttatcaatattgagaaacagatccagatcaccatagtacttgaattggcatcgggtttgtgggttagcaacccgttttgtctttctagtcttgaataataatcggtgatctggatgagagtacgcatcttttccaaacaggttaaataatttattttatcttttattttaatttttttaatttagtttttatcttttgaaaaatttattttaattttttatattttaaaaattgattaaaatagtccttttatcagtatcattaataaaataattattttaaaaataatttaaactatgatttgtgcttaaattagtcacgttaaacttaacattatattggttgttcaatgataaacagtaattcttgtcatcaagattacatatagtgccgttggaaataattagcgagcaaaattacacataaacgttcacaagagaaacaatggatataacttcatattcatataatcatgtgtttgattttttttttttttttgaaattcataaaacgttagatattagtactttttctgtttacatacgggatttctcattagtggaaaactaaacagtaaacacactctaatgagaacgtgtcacgagagtaaatatagttgcccgtataatttattcatttacttaagtggcccccagtttgctagcgctacattgaagaatacaagaaacaagggaagtggctttccccggacactgaaaaagaaacttgtatgtgtaagcacaagctggattattattcaaaagttacaaataaaaatattttctaataatttacatgtgaatatataaaaagaaatgctttagcgtaagtttgtgtaaatatctttatttcaatgtcattccaacatgcgaattaacaaaccaacgtaaattttggagtttttttccactgttttgagaatcgaatctgacatgttgattcgatgaatcggtcaattgtttgataaaaaattgatacatccttacatcggctaaaaaccattgaatcaatcaaaaatcactaaaaaatgataaagtcattgggttaactagttttgtttaatttttttaaaaataaaactttcaaaacgacattgttttgattttaaaaaaattattataacttatgatactttaaagtgaagtttactttctatttttattattatcaatttatgtatattatgttattttttttcaatattactatgatattatattaaaatattaaaaaatatatatttcattaaaatggttcaaatcttattgaaccgttgactctggaaccagtgtttttcaaatattgatttttttagaatcatgagcccaggaaaagtttctttctaaaagggaaaagagagagaaagatgaaaacaaatgcctacaagctctattctttatttttagagatgaaatatatttattaatatatcttctcttaaatatttatgtttgtttaaaatcattttatttatggcataatatgagatgttatcaaactatctccgaccatttaatttatacttcaatctcaatataaaataagtaaatttgtaccttcacttgatggattcaagttcaactttagaaataattcattgatactttatgctgcacctttcccttgtcaacgggcccgcagttttcctcctcaacaacgtgttttatcctttttctacaaaggatttgagtattgatcattgacaagtgtgcttttctgtcatccttgacaaacaggcacattagggccctttttcctgttctcacctttgtttgtcacgcttcatttttcatatcttcgccaaactctgtctctaaactatctttatataagtgataagtccattactttatgagtgttgaccttcattcacctcgctgttggataaaatgctcttggcctccaacgaagtccttcttaattcctcatcctccggtgtctcttcaagcaatatttcattgaagtttcccatcttttcaactacattcatatcataaacataatacacaaattaagcacataaaaatgttaaaagtgcattgcattatgtaagtaaatgaaggaactttctttaagtgtttttctgtttttaccttggcattacaatctgctcttctcagcctagccttgctgtaagatggacgcaagctaagagcagcattgcaatcttccagggccttctcaagttggcctgttttggatctacatgcagctcagttgcatcacaaaaccgagttatatggatcattctctaaccatgtccatgggcggatgcaggtgtaagattgggggggcagtgcccccccttaaattctcaagaatagataatttttttataataataaaataaagtaaaataaaaaaatagtttaaacgtttgtacgagaggagaaattgaaaagtatagaaaaagaataataaaaaagataaaaaataagagagaagtgagtgtggatatgtatgtttgtaatttttataaatatagtggccacactcttgttatttttaaggaccggtaacacgctaattttgtcaattttttctcttttgaattgtacatttttcatacttttgttataatgatttgttcctttaattttctttacaaaaaaattttcgggggcgctgcccccgagcccccgccactagtgccccccttacatttttttctggatccgcccctgaccatgtccatagacaacacatgcttcggagaatttcaatgccttgaaaagctcgtttccgtttgatcgagcagtggccacagctctagcctacctaatcacctccttaatctcattattatttggatcaagcctagatgctcgctgaattgcaaccaaggcatcttcaaatctggtatattattgtgtgaatagacagagattaagaaacatattctgcttttcaattagaaacgaaacattaacctgccagcagccaaaagaacccgagcctaagtcaccaatgtatttgcattgcaaataggtccaaagaatttggtgcaatgatccacatcaaaattagatcccttcaacattgcttcttctgcatgttggtgcctacggagcataaaaaatgcctcggtttgcaacgcaaatatcttcaagtaaagccacaatcagagtcatatcagcatgattgaaatgcatgtgcatgtgatcgatcgcgggtaagatctaattcagagttcaatgtgtaataggagaaattattacatgattcaagactaccatatgtctatggtctcaatcaatatttacattacatataactcaggttttccatgaatgaaaaagttagtaaagctgtgttacttgtggagattgatcgagaccaaaatgactctagatcatgtaataatttctcgtgtaatagaggctagtagctaacctgtggagcagaatctgcaccaaatgaaatagtatagttggtctccttaatcaacttgttccaatctcctagcctacgtgcatttgttcaaatggacctgaatttttttgactttagcaatctggtctgtgtcagcctctggtcctgcttgtttataatgataaagagccttatccatttctcctaatctgtagggaaacagaaactaccaattagtgacaacaccattaagaaagaaagaaaaaaaatagaagagttggaaggagtatattctgcaatcaccatctttttcttgtgtgagattactcatgttcaagtttcccaatcggtaatgagctctttgataacgaggctctatttgaaaagcttctctgcattcaaacacagcctccagaagcctccctagagccgttaatgctgcaattttgttgctcctgtaggaagctttattagggtcaattgcaattgcagcagcatgtaaagagccaatgcttcttgaaatcttccattcttataatcctcattgggggttcattctagtggacacggccctgaaatagagaacccggttgttccttgcttcctttacttacattctccaccgtttggtttgagtatcttccactagtaacagggttctgagaataggtgtttgtgttagaataggtatctgtgttccctccttgcctgaggttacctaaattaccaaacatcatcacgttgctagaagaagcacgaacaacggtgctgcttcccttttgacgatcggtgatcatgctttcaagttcaccagaaataccaattgcttctttagggacccttcttccattgttgacatagccctccgtaggtgacactttgggatggttcctttggtgggttcggttaacaacagggtttggcttgtggagaggcttggagccagaacgagttgaagagttattagatgaagctgttacggagaaagttatatcttcacagccaccttgatctttttttttgtcaggggcgtttgatgacttttcaaagttgttggcattgttgttgttgttgttgggaggagaacgtcagaatactccatttatgaaaccaccacaaccacattttccctgtggggagttgtttcccatgttccaatggtttggattgtttgtctttttgcttatgttaaaggatgcttcactaagatgatgataaaggactactatatttctaagggagattagattttaatagattggttggctggttgaatctcttagtatattacatgcccagaaatcagaattcaaggaaaacgaagaattgtacaaataaagattgattctataaaatgatgacttcaaacatctccaaccaaaccatgtgaaatcgaacattgaaacacagcaccaacttcgatcctagatcctggagggactccttggaaacaaaatttcttgcagttggaaaggtcatatgaaattgcatcatctagaagggacacagagtactgatacacaaatgagttagtttttttattgttttgtttcagatgcttgtttgattatggcaggaacccagagacccacccggtcatgggcacgaaccctcacgatagattatgagtattaatattatgttgttatatgtaattaacttgctgcatggtttgagtcgctacatcgacccttaaacaaactgtagtgtttccattttttaattggtattttgataaatctttggagatggtggacatatttattcagaaaaatattaacatcatgtgtcaaataagttggagaagaagctgagataggcacttaatagtatttaaactttggtatacaagaaaaactagaggaaagaacatgcatgttaatgtcaacaagtaagatatattaaagatgaaaagggggaaaataagaaaaatgagaactaatattttttaagtttttcattgataaacaacgattgagacgatggattcaagaagacaaataaaattcgacttgtaatcacaaaactaaagctgaaaaggtaacagaaacccttaaaaagagattaagaacattagagcaaattattagaagaattttcattataaaatatctctaaaaaaatcagttcttaactgagtccaattacatcacatcctataatccatgccattgactaaacctaatagaataagaatataaatatacaattttatattcttattatacattgtattacgggttaatgaaactatcttaacaatacaattttatataaatattttaagattaaaatgttgcataaccatttacaatatcacaactttattttctacttttacataggatttaatggtcaaatttacatctatagatctcatgcgattgtagttttcataattaactagtttaaacttctaataggtggcatataagaaacgaagtccaggaataggactagcaaacttacacgtgacagtatgaagtcatgaactaaaaccaaagtgcttgttagacgaaggtggatgtgaaaacattcaagtataaaacatccatctaagatgtaagccaaaaactaaatgcccgcgaaacttaaaatgaagctcagattgtcactacaattttctgcaagtctagttgaaaataaagcagagctaaatccaatcctctaaaagtaaaacttaatttgtcgaatgtaaatgattctgtgatccaattaaaagaaaaagaaaaacagaagcgtgggtaaaaaataatatcaggctgcatcgaaagtatcaagaggggtttctgttcagctctttccctatcgcttctgacaactcctctgcattatactcgacaccaaagcatctcgtaacctccattttaggattcagcaaatacctaattgttttaacatagtttatatccatgtttaaatgcaaccatacagagctacagaaggatgaataagggtagaacaagtgcttacatgttgtgggaacagtcaacaagataatcactgccatcctcttctacctttttaaagtaaacacgatattcttgagccatctgcctaatagctgcaacaggtccagttaatcctatgattcttgagtcaaactctgcaacacaacagagggaaagatagacaagaaacgttagtagggcaaagccaaaagggtagaacattttggaaaggtgaactaaggaatggcaatgaggtaggacatcccaactatgttggcaccccctatctcagctatcataagcacacctgaatatcaagcataaagcataattgaccaaagctaaaatttgaagtaattaaaagtgaagttttgccagcaagacaatctaacctttaaggtaggcacgaagttgtgagggcgtatcacgttgaggatcaatggaaacaaatactggaagaatcttaagattctgttttgattctttatccaaataaaatacataatattaaggttaacccagagaaagaaacttataacacagtaaactgagattgaagtgccaaacctaatatatcaattgcctgggccataatttggacttgctctggcccaagatcgggggatgaggtatagccaaagtagagcaagacccaattcccaagaaaattatgttctgtaattgcttgtttctctgtattaattagtgtaaatggacccccaattatgggtccattggcaacatttctgaggccaccaccctgatgacctgatccaagaaataaagaaattaggataatggaaataaaacatactttaaaacttatattgggatgacactaatgtaatccgataacttgctaaactttgatgactaaacctggaaattgacaacttcaaaatgaaaatgaaaccatctcacccagaagtcacaagtgattctatgaataatcttggataagagcaaggtaaacatttagtcgagtgtgtgtaattcttacaaagtattgacctggtcaactcaactgcatgctttacatttgcaagtcacgggtcaggttagacaataaaaatccaaccaattaagtcataaagcaatgggactaggatctatcccaagctccagtaacaagtcccaacaattgcctactttgcaaaacagaaacctttgcaaagaagagattatacagttttaacacaacaaaaaatggatcttcattaagaattaagaagtagcaaattatgatgtcattaccacttcctttatgtattggaataatcttgcaaaaatgtaacagattatatatccaccctacattctgatgtaatgaattgttcttgataatttaccatatattctcatcaaagcatatgtagctcactgatacatatgaagaacaaatagaaacattttattattgagacataaattagaatattcaggaagtgagttagacaaaaagagaagaaacttgggcaaaaaaaagaagtaacttggacaaaaagaaacaaagtgacttacacaaatgttttttgtcaataacttcagaccaatcaattgaatattgattaatatgtaatcgatcaaacactacttgaaaacggctattctgctcagaaatgaaatagttccaatgttcctggaaattcttactcccattggaccatttgtatctatatgcattaggatcccgattcatggatctctccctttgagaaataaaaataagaggatcgaaccatttcttttgactgtttttcaaattggattcatcaacagaaagaaaccaagttggattaaactaagaggaactgagcatctaatcaaatgtgtttgtctggcaattaagcgaagcctgtccccaaatacatatacacattcacatgcctaatcattaaatggcactaaaagcgacttggtagatgtagatttggcacaatgctgcgataaaaaacttaatgatataagtaaataactaagcaaaaaatgagcaaaaggtgcatagctcgtcatttttagacactgatgttactcagtgtatgtcatgtcaaaattttgaccatggaaagtttcccatttgcaaaatgcttgcatgttcataaattgcatcaacggatttaacagagtgccataaagccaaaaccatcaggtcatatttcaaaaattaattctaacatatacttagaccttactccatagttcatgaaacaccactgaaactttataaccagtacgccagatcactgatatacttagaccctctgacctcctttatcataaccatatttgacactatcaatccgaaacctgtaagaatttcctttcggtgtaaactggactcaagataacatgcgtagcaacaaaatataagaaaggaataaaagattgcaaatatttctcatgatgaaagggcataataattaaagaagtgtacagataaaaagaaacacttgtcaccaaataattgaactccaaactcttcaaagcagatatcaattgagaataccagattgcaaatacctttgggaaccgctctcctctcatcattatagtgaaaaaaagctgcaagcccggcaaatcctagaacagcagctggctgcagttaaatggaataaaacgcagaattcaatttacttgaaatgaggtaaacaatcacgcggatgttgaatagcaatgcaacaataagagacaaaaagtggagtaagggaacatacaacaacataggcaccccatgagcgagaaacctgggaagtggaggtggattctgggtggaatacaggatgaagatcgtgttttgttttaccatgttttgttgattttgtatatctaacagattgagttatcctagagggaacacacctataaacataacaaatgcctatgatgcaattcgtcaaaattaattaaactaagtgggaaaacaaaatccccaattacatataaaagtggggattttagagagtgacctttgaagaacagcgagggccgcagcagtggagcgatgctgggaagaaaacagcataaacctaggaatgggcatgactgagactaactattattatgcactaataatggtggaaagggtttttggtggcaaaaactgaaacccatgacgtgcacctatttctgctataaaacatccaaatactgccttgctttccaagcttattcttcctccaggggctgctttgaatggattggatccaattcctatatgcaaaagaaatggcttgtcatctaaattagtcattagtcaatagtcataactcaacatacattttattaaataggattaaatcttttttttgagtgtttaataaaacaaaattaaatttttttcatcatccttctagaattctagtatgtattggtccttagtaacactctagttacactttttttttttgttttttatacactttttttttaagaaaacaccacaataaaagtgtaattctgctgtgttttgttttatttagaaaaacatcatgacgaaactaagattttattgtgttattggatgaataatataatgaaattgtatttttgttatgatgtttttaaaacaaagaaaaaacctacaacaaaaatataattttattgtgttattggataagtaacataatagagtcaattttttgtcgtacaataaagagtgaaagtaaaataatacaatagaatcttaatttcgttatattattttggagtaaaatcaaataacacaacaaaaataagattttattgtacaatttttcaagcgacaattgtgggatgactaaagtgttagggccaatagcaatacccattggacattgagagtgctgttttgttggcccaatatgctttcgttttattattattcttttattatttattttgttgcatatcttgtattgggctcagctatggaatgatccaattttagcaattaagagtaatttatttatttcatgttagaaaataaatattaagaaaagcggacaaaattgggtgttgacatatgtgtctgtatttaaaattttactttgataatcttgttagaattataatatatacaaaaatatatattttatataatacttattattatatatatatagttaatatttactaagcatttatttttctttaaacaaaattacactcatgagagtaaaccttgcaactaaatttttcctccttaatatatgacataattattgtattgattctaacaaaaaaaaatttatcgttaaacttgtacattaataaatattatatatttatccattgatataatgaaaatagttgtgcatattattagcgtacatcatctgtaacatcctagaaaaataaataaatatatatataaaataaataaataaataaatgcataactaattattatacttttaacttctatttaataattgtaataacttcaattatataattataatataaaattataaaaatagaataggtaatattattaaaaaaaataaaaataattttcaacaaacattaatgtaaactctagcattagttctcagccacgtgaggaattacaagttaaatccaaatccttaggaaatcttccaggtggcaaaaccccctcagctaagctctcagctgttccacgtaaatgcacgcattaatgagaggaataatagtaatgatgaatgagataaggaagcttagatattttatcataaccagcaatataaaaatagcttggcagcttacaaaatttctgccccaaaatctctcagttttctcacctcacacttctctctctcacgtaaaattactccagcagctctcaaagcaactcaccaaaattatcataggtaggctgggcttcgatctcaaaatttgaaactaaaatttacgattaagttatgtatttatgaggccatggttaaccgttaattagttaaagattgaagttttaccataaataggatattgtgaatttttagcaagatgcggcaacctagaatatatatatatatatatatatatatatgtgtgtgtgtgtgtgtgtgtgtgtgaaggaaacttacgaagggtatctcggcacacttatgataatagtttagatatctctattcatgcatctcggtctgtagatactgtagtaattattctttagggtatttatacacatagatcttgactcataaggaataaatagaatccaacagccctgaccacgtgcatgtagtttagccagccttacatttagaagcacctttgtacctatgccataccatgcttatatatatatacatatatatatatatatatggattccagcagcctgtaagctttacttccacgtaatgcttcctccttatatatccatatttaccttggcccttctaagtaagcagctatagtacttaagaatttatttaatgtcttatatatatatataactataatacataaatagttatcttatatatatagttatagtacttaagtaattatttaatgtctttatatatatatatatatatactgtaaatacatatatatagacatatataaatatatatatatatataataaacctggttaaaccacaagtaaacctaataggctttaagtaatacaagtacaattattctgagtactatattttgctataactagctgtgttttaatatatatatatatatatatatatatatatatatattattctcattgtttcaccaacccgatttttggctacaattattataccactaaaaatcgacatcccgtagaggttaaatagatttattttagttggtgaaattttacgtgaacaaggtatgaactattaactaccttgcttaggaacgaagaatattgaattattaactaccttgctttttgtaagaataggaatattttccttatcttatgaattttgtggtatgaatgagaatgattcgggtttccagaacggacctatgaatttatgagattgacccgagttttgaagaccggacctatgctactaccaaagatcaggtgttaatacatgaaaattcatgcatgattagcataagaagaccgcaacattcctacataatgtacatatgtagaggccatgtgcacctgtgaccattgcatttcattctatgcattcatacattcattttacacattcgctcagatatattaatttatttactactctattaaattatttgatgaattagttttgtcttatttcataacctactaacctatttagtggtttagatttgcctactgagaaatttatttctcactagatttatttttattttagatggcttcgatcatagtatttcttgatgcactggatatctggtatgtggatgaagtcagaaactattatgtagtaactatgcatcatgtactgcgtgctcatatttacttcggcgcccattttccaattttggtgtttagtgaagagtttgacccaaccaatccgttctctcagtttgctccgatgtatccaaactcggttaccaaccccatcatcgtactcagtgacgaaaacagtaccaaagactatatttgaatactgactgaaaaactttgtacttaaataaaaaatgtttgaagtattatgacatatggaatgtcaaatatagttagtatgaatatgacaatataaaatagactaaacatgtaatatggtgtatgtttatatttcgttccttttgttaacttcttttgtgtctactgaaatttcattttattttatttagtttaaaagataaaagaataaaataaaaatataacataaaataaaatagttaagaaattaaataaatgaactttagacgttacatcatctactaatgtaaacatataataactgtattagaaaattaattttctctaaaaagactcttttttttttgttagaaataacgttttacttacataaaaggaaaaaagaaaacattttttagtgctacacattaaaactaccatgaccatacccaaatggttggaccacatgaccccaccacacccactacgtagacttgtaatgtggctttgacgcagtcctacctccaacctttttgctttgctctttcagtttccaccacttaactttccttttatatttctgtcaattacaatttattatctaacactaaaatttccaaaaatctcgagtgcctccttaatacagcgtttgaatcaaataaattaggaatagtttaatgtaccccaaaagaaagggctaataaggtttacgggaaggagaaaaaaagaatatggaaaattgttaggtggcattggacttgtcaaaatggcgactggtatcaactgctccaaatgtcagtcgcattcccaaattgaaaattatatatgtttatctattcatatcactatcttcatatcaaatctataaatcaagaaaatggctgttacctctcgtgcatcatcattaaggtatctcttccatcatcctccgcacaagctagagggagagggtctcacttgtactcttctttttttgtgtttccgaattttacgacttttccaaaaggaatatactaacacttttaaatgcacttagggacaaaaggacttggaggaatcacagaaaattcaacagttaagaaccctctcggctattgtttttacgataacacatgtgattagattaattcttagtacaatgaataatcaatacatgcaatgccttctctaagaaaggttttgttccctcagaagtatttgttgattttcttaatctcaatgtatagagattatgcaatttcatataacaaaaatacaaatagattccacaacccaaagtatattaaatttctagctcgtacggctgtattttttcttcttcttaattaagatgaaaccgtgggtttgtaagttgacactttgcttgaccagcatgtatgtttttcttctaagtttattgatcatttagctagcctgtgaacgtgcaagttacaactgagtgacttataacagtaatgttaattgctattattaattttaaatgtaattaataagttttttttaaaaaaaattaaactgcaaaacaatactaaaaaaattagtaaatgatatagttagtgctgtcttatcacgcgtttgaagcatcttaaatttcaaattgtttccgtggttaggttaggtaaaagcatcatatattaataaggaaatttggcttgatctctaaatatttgtggtgtgcatcacctgtgacagagtttccttctcgggaacaaagcgaaaacaaaattgaacaaaaacaaaagaagaaattcaagtgaggaaattgaaaaattatcttccatacataatatgatataattaatttcaaatagtagtacgggaatattcgaataattgcattatcgcctcgtatggttgttctacgtacctttctacattcgtccaatttggctttagcagtttacgtacagcatggtcacaccttagaaaacaacacaaaaataaataaacataaaaaattgaccaaatatttgtttcttcttcttttctttcttcggggattacttttcaaattttcttaacctttgattagtctcgtttttctcatcgatcatccacacacactcatacatatctttttcagctattcgggtatccatctatttagttgttttgattgattgttgacagatggtggaaaataatagcagagaagaaaaccaccgaaaagggacgagaggcaagaaaatattcgcgtacgtgttgctaaaaactaaacagtgaaaaggcatggcgatttggggaatatatcggggtaattggaatgtgatttctctcttcctttaatcaattattaactcaccatcatgcactaattaaagctatatagaatccccgttatatatttcttttatgctatattatcaatctaaaatttatacatcattgaatatgtagaccgaattgttcttaccagcggatagtgattttaaatttaagtcttgtcttaaatccaaaaatttaactttctaaaaatattgtaccaattaattagatattttaaatataaattttaaaatagtcaatttaaaattaaaaatcaattgatgaatatataataatataaaacaatttattattatgttatatagcataataataaattgtttttatattattataattaaattcattaaaaatggtatctaaaatattcaatactgtaattttacatatgtcgtcatcgatttaattatttatatttatagtttatattgtcaatccattctaattaaatttattaagatttaataattcaattttacatatttcttcaccagttttattgttttatattcgtggtttattgatgataatcgaatgtgttgtgtacatgaaattggtaaataaatgcgttttctcttttctttttcataggagtgttttcggacaaattttttaggttatgaatatctttttaaggaaattgatgaattatattatatatgtactgaagttggtatatatgaatgtattttcttaccatactaacttaattagttagtgtcgcatgactagcacaaatattatatttatattttataattataggagtaattttttatattattttgaatttttaatatactattaattatttaatttaaattttaataaatatatgttagttgatatgtcaataaatattatatttttacatacaaaaatattccaaaaaaattattattactaagggtgttatccttattaacaatgaaagtaatcagttatagaacttaaaatcattaattataattacatgtaataatatgtccttggtatataactatattttcttacaatattttatatcaaaattaaataaattttacgaagtttaggaaaacatcaccatcacacgcatgcatcaacgggcacggtattatttttaattataataaaattctcattttaattaaatcagtactagaaatatttaaaatattgtaattagggtgtgtgtttgatagaggagaatggagaaaaatagaaaaaaataagatgaattcagtgaatcttatacatgtatattttttacattttattttaattcaaatatatattttatttgcattctcgaccaaacacaatattaagtttttttattttatttttcttctatttcgttagaagagatgagtgataaatatgttcatcagggatcaacaagtgaatcgaacggccagcatcatcatcagacaacaatgggtatgtccacgactccaattactgtccatttgacaataatgtacattagattagaggtcccatcaatatcatttccgaaacctttcttagattcatcgcttatccttgtagatggaggggacggtgacatatccagtaatacacattaaagtagttttacatgttcaagcaacataaaccagacacaattagttcaacagtttggggcagattaatgcatatttatactcaaaccaataaacaaacccatctacagttctatttgtaattattttggacctttggagcgatgtgtagtgtttcaatattgttgttgaaaaatacttttggggaaggaaactgcacaatctcggtatctaacacaatattaaataaaagcaaacagaataaagaagaaaataaaatagaagtagcgtagtatgaccgtatggcatctgctttatatacttacggttcttacttctttcatattggactaatcatagtgatagaatataagataatcccattgatgtggctctttggcggcattctattactcaacttcctgaaagtttaattacaataaataattttgataaaaatattgagttttaaattttagataaaaaggacgattagtaggcccatgttgtccccgttaaggaaaaccaagtatacatactcacacggtgacgcacatattgccatatattgagccttatttacatacattattaccgagatattactgctatgcgatgtatatgaccaggaatgttcacaattttttcacagtaaagacatggataaactatcatattataaagttaagatgaaattccaacctaagttttagatgacaggtgaaacaattagcaagaaaaacgatttaaattgttgtaggcagggaatcgattacaaacatattatatgtacaacctagtaaactttcgaaatatagtgtacatgtttttgcttaatagacttggtattgttcgggggcaaacttaggtacgcagagcatataggtatatcgcaaagttaaaagggtataaatgtttcacacgtagaaactatacgaacagctatgtacgtatactatggaccaagttaattattttgaggattattaatattagatggtcatttgattgttgaacagcttccccttcccaaaatcacacactcacaaaagaaaagaaaaaaaaaaggaatacttttgttgattttggtcacaagtttcgttggttggaaccaacatgcatgttgttgaactgattcacccatctatcctttgagaacctggtaataaaattggaattatttttacacatgcatatgcttctaaattggtggtattagcaactaacacagacgaatcataagaagaagaagaagaaagagttaacaggaaaaaataatgtaaaattactaaaatacaagatattaggtatacttgataaatatcatgatttctcttctacgtctttattttagaagaagaaggctgtggaagattctctcagattttatttcagatttcccccctattaataatttataaataacaatttccgactgggtcaaagctactggaaacaaataagtcacatttcttcattttttaataattaatatcaataacaaaaagatataaaaattgtttcttgtgtttaccgtcaaaacaatctttactcaactttttgggcataattttttttaagggaggcataaatttattttatacaataataacatatggacgtatatttagtcgtttcttgacgcaacttggaaagccaaatatggttgatctcttacctttatgtaattcaacaaccatcactctagtaaggttgcttgcacacctcattattccgcaaaatgtaagatatgaacagtaagaaaataatgttctaaataaataatacataaccttttcaattcttctatattatgtctttcctccatttcagtctctaaatcaaaaccacaaatctcacatactttgacagtttgaccactaagagcctgccatcacaaagcctctctctctatcttaattcctatagctaccccactccgatattttgctggtgaaaccacatatctaccagaagcagcccctctctctctctctctctctctctctctctctctctctctctttataggagaaaaggctagagaactatccttttcttttcccttatctctcctccttttcgctttcacttgaaaccctaatacttgatcctttttaaaatctgtagtagtaagtaatccaaaacccaggacaaagaaagaggcaagagacatagcaaagacttctcctaccctcccaagtcccaaacagagtaacttgtattcacaatctctctgcaccaagtatattaaatgcatgatcatccgtgggctgtttattcccttgtttacgtaacactacccttttgcacaaacacagattaagtaaaagtgatccaagcactctgtctgtgtggcagttgcagtctcgcagagagcccttaaagacgtgggtggaaggaagcactttctcaagaaaactagcttgtctttccacaaccagaaaaaaattctctctctttttgtctcgctcccatacctcattctgtagctaccatagcaccctcttaaatgcacacttgttctatgtgcaagtaatcagaatctctctactctttgtatccctcacgtctttccattttctgctctcatggagtcggccaacactagcgggagcttgcaatcctcaagcggcgccgatgaagagtacgattcacgcgccgaatcatcaccactctctgcgttcttaaccaaccaaccacaaccaccaccaccatgccaagttgctcgctttattccaccatcacaacaacaacagcaccatctccaaaacacccacatgttcgaccctttatcaaactacttggatcccatcacacaaagttcaaaaccactgttaaaccttgacgtgatgtggtccaaaacaggtagatcccaaccaaaccaaaccgaccttgttgggttgataccttgttcatcatcatcagtaccctcgccacataaccaagcttttgtgtcaagtcaaacaggagggaacaatagtggtgcttttcctaccttgcctccagaaagtggttcccgaggactaatgctttcagtgtcagccgccaacaatgatcaaattcaaacccataacaacaacaacaactccaacgtggttcgaaacccgaagaaacggtcaagagcttctaggcgtgcacctaccactgtgctaaccacagacaccaccaatttccgagccatggttcaggaattcactggcatcccagcaccacccttcacatcctcgtctttcccgagaacaaggttggatctctttgcttccaccgcaacaccaactttgagatccaacgttaacgttaaccctttggaccctccaacacaacctccttaccttcttcgcccctttgcacaaaaactccaacttcgaagtcttcacccgtttcctccctccttttccaacactttactaccaccttcaactaactcttctactaattcaacttccattaactaccaacaacaacaacaactatctgagcatttcggccttgtgaaacagcctctcaactttaacaacaccaccccagacactagtactctcgaggcatatcatcattccaaatacactcttggtaactcttcttctgttcttgtctccagaacacaacaacaacactccttggaaattccggcgaatctcaaaatggggttgtatgaggaactgggactgagacacgaccatgttaacactgacctcggatgtcttcatcagaacatggtttcgtcaacatcagttggagtgggagcattgtcaagtggcaacgacaacaacttgagtaatgctaccaattcttcaacggaatgggcccagagaatgggcaccattaccaacaatgattgcgatcacggaggaggaggaggaggagctctcggtggcactgttaactacagtgacattggggagggagctgttgtcactaatggcaaagtacactactcagcttcttcatcggattttcatggagagaagggaccagacttcactgtaactactgcagccagaactcaaggtatggtggagtcctggattaattgttcttctgattaaagcatatgggccagcaaacagaataagaagaagaagaaaaaaaaaaggattgatgtttgtgatttcataaagtttaaagcaattaatggtgctatatgctagtataattctaatgcatgaaagagagaatcttatttggtatcctcagcttaactatgaccatcgaattaattaagtaaacattatttttcaattatttcttctttttttcttttcatggtgttttggttcccctcaaattatgtgtaaataagtagcagctaattaacttctctttctctctctgtctctctctctctctcaattattgttcccccctcaaattatcttgagttgtgcttttaatcatatatacaaaaggatcctggtggtttcaaagtgtttatcatatcactttatgtattgtgtctctactatgtcaattggagttagattataatatatggatcttggttttgacttgggagagtttaagagaaatactactattgtataatctgctgcgttgattgaacaggattaaaaaaaccgaatgtgtgtgtctccctctctcttcttgtttttgaacgccttcaattcatttggcatctaatgtacgttctgcagtgtaaagatctccttctctctcttttcagtcgttaatttaacgccgattataaagttgtgggttctaggagtaattggtggcgacatttggggaattcttagccgccgcattcttgttttatcgaaatcaaagacatcttcatatgtttccaatttaaagattatgacaataacatataaaaaacacattacacatgggcatgtatccatgagtccatacattcccgtcttccacttattgttgtttttaaatttaaaacaaaagaaattcaataattgacgcaaacatttcacgcctgtgcattttaacggctaaatcatttttctttcttttgtcgatcatcttttttttttcagaatttaggaatagtcacattagaggcttatcttatatgtgtacgtcaccactcaaaattggctcacatagtttccaccggcgaatatgtagccatgatgtgtaataataagatttcaatagtagtgaccagttgagccaattatcttggtacgtatgtatatataaaatcattatacactgaaaaaatggaaaaggaaaaagtgtctgtctgatttgaatcatgaaattatctctccactactttttattttaatttcgcgcaaaattattgtttttatttcctctgaagagaaaataaagaaagtgctgcgggggcatgcatgttctagtacgcccataaatgagactcaccttgatggatttaacaaaagtggggtctcggaagtcggtgatatggttgagaagtgttgttaatggaataacgaaaaccacatgttcacaaacattccaggatcaagaagtgttgtaagatattagttcctagcatgattcatgcatgacatcttcaagaagtgtacccgataccgataccaaaactatttggaagtctttatggttcattgcactttgctggtgtgttttgtttgtgtgaataggaactccgtactacaatacaacagtataagatttttttttatgaaaattaaaataatgcaaattaggtatcaaatctgaagaaacacgattgcggctaaatgtcttggtgtatcaattaatatatggtcctcctagtcccgtaccccgagccagattaggacaatggaaaattccaattcaaataattaatctgaattttcatgacagtatttgctatgtctatacgactaaaatcaaataatttaagtgttccgcatagacaacaatttttgacattttgttgcttttatgtgtacggttagtcaaggaaacgcgggaaaaagttaaagagaccaaaaggaattacaaagggttaggatcagaggaatagtatatcttacaattgataaattattggagtgcgcaatcaccttttgttggaggagtggaaattttttaggtgattcaagatatattattattagttgtttcttgtaaactgaaaaaaattgagtgtatatatatatatatatatatatatatatatataatgtaaagtagccaaaactatagacatgtaataatctcatactttttaataatttctcgaggaagtataaattgttaaaaagtaaatatttgacattatcatcatgctttagtttgctagcatgcgttatctgtgtattgaataatttatattaagatttttaaaagatttatttaaatgaaaaattcaatttttataccattgattttctttaaatctgaagttcacataattatactttatcatttcactttgttttagcctatgatatactatttaaaatataaatagcaactattttttacaaatgataattacaataacatcacgtgattcagtgaataacttgataaaatttatttatgatacaatattaccaaatatatcatttattaagtttgatacagttgatgtcatttgatttttatctttatttaataacaatactatcattattatattcaatactctataaagtattgatttttatatttatttgtttatttaaaattttaaatatcttaacctactaaaaaggcttaggacatttatagaggtagaaatgttggcctatttaaaaaatttaactacagaatggacaattagatatactcttaatactaagtccaactttgaaaaaaattgcatcagactccaaataaaaagacatgagttaaataaataatttaaaccttaaatttaagatcgactcaagttaaatctataataaaacctaatttaacctagtatatttctaccgttatttccaagggctgcttcccatgtgtgttgccaatgcaggcacgtccagatcttaatgctttaatgaagtatggtgggatccaattatgcggttctaattacataataattaaacttcttacctagtggctatatctaaaggaaaaattggcaatatcgaattaactagtatatatgccgcagtgaagtataatataaggttcaattaacatacctaatttatgaccgaaaaaataatttacctaatttctgaagtacttgcccaaaagggaaccgtagaattataattgattatttattcacttaccgattaaaattatgataataaaacccaataataagaaaggaggaaagaacatcagcttcaagcacttctgagctggaatgattataatttaatttgtcaaagttgtttgtcttttgcatgaaatgtccggggatacagtccactccaaaacttaaaactctttttgatttcattcatttatagatcatgatcttttttcatctcacttttgtatttagaaggatgagagggagatatagatgtggatgaatttcaaaagtttttgaatattattttttgtaaagaaagacatgctcatgaatcataaaaaaaaatatcataggggtactttccaaaagataagcagctttcacattaattacttttacaaactagtaaagattatagtgtatcaaatatgaaataaaattgaaatgattacaggtgtgggattttgggagatttgttaggagagggcttccgtgaaaatggatgccctctatctttgacatttcatttaacatgatgcatggtggcccattgccagtaaacaaggcttcgcttttttgcactttaacagtgatggctttatgcctttctctcccatcccacccctacagtgccctataattttgagcctaaacttgaaaaagatgaacaacttttccactcctcatgaaaaaaggctgcccctccttcgcttcaattcatttcttcactcgggaaagcatcaattcaagtacctgatgccagaaaaagacaaagctatatcagttgagttgaatgaaacttttttttttttaattaattgccttaaaatgtatgtatgggtcatcactttagtcttatttttttgtttaaagaggtctttattagaaaaaaaattcaataaagcgataactttttatgatttaaaaataaatagtaaattttatagtaatgaaaggctaaattaataccaagagtttttttttaacccataatataagtacaaaatatttattaactttattgataactaaaagaacccgactaatcatgatgaaaccaaaaataaaataaatattaaaagagaagaaaatttaacatataaaaaataggagtgtttaggaaaactataacattaaacttaaaatgctaaaggttaattatatatatatataattaaagggtcacaaaataataaatagatcttacttttttattctattataattgttgtgtgagaaaaaaatgttttaaaataattattattttaattttttaatataatattaattactttttttatttatatctcatataatattaatagtgaataataaaatctataaataaattaataattatataaaattaatttataaaaattatttatttattattttttaatctgtgtaaaataatctaagataattattgttttgagatagaccaaacaaaaagaaatcctttggtgatgcactgttttaaggctccccgcacaaagttgagtggttataaagaagtttacacataaatgaataaattgtttctcatagcttatatttagaatgtcaccagtatgaaagtatagggaattaaaatgtgaaagcaaatgctttggagtgaataatatccacggtcacaagccttgacttcagatcgattttaattggtgtgttgtctcaggcaagcagatttaattattaaagtaatattagaagggggcaaaagaaaattttatatgtaaatattataatgtttatgtattacagggggcggatgcccttgttggcctgtacacctaattttgccttagagatccaaattgaatcaacaaaaaaattaaaagatgaacaaattaatttaaccaaaactaaaatctcataattaaaactattgatagcttgattaacaaataaaatcaatataaagatatttatatttataaaacaatcttaatcttttcgtaccctattttatacacctacattatttttttcgatttttttatattttcatattactcatcatatatatatatatatagattatttcccctctcaagaggatataaattatacaaccacatgagtggtaaatagaggactaaggcccagtgtggagccaccaagcctctttcctctggattgcattggttattaccgcaagttttgattgcctactagagcctataaataccatattctctcattgtggtgttatgttcattcttttttctttcatcgtcttcttttgcagttatgcgcaattatgtattgattgaatggtcagactagcactgaccatgagctttatagctatttttactcatgcatccgggtaaattcgtgaacgctaataactgaactgaaatgaaattaagaaatcaatttggttgctatcgagtacttaggtgattgaaactagataatatgttcatacggtgaagatgtgaggttagtctgatgattatagaagagagacttaagaagaagagagaaaaggaaaatataagtagcatatttaaatatctttaactaatattttttaataaattaataaattaatatttgttaataagaaaatatgttcgtatgattcagtcacatgttctaagtataattaattcgatcaaaattgacgtaatacaaaattttcatatttcaaaattagtttcattatgcataagaaatagtgatatataattgaatgacacttcaaactgctatatgatatttttcctagaaaaaaattacaataaatgaaaaattgtgttttataccgtgagttaatagcttattttattttttttatttttgaaatagtattgatataattttaaaaataattattataaaaattaataaatttatctttgtgttaggtattgagtaaagattttggattcaagatttaatctttagtaaatctcctaggaggtgaatatgattccaacatggaaaatgagtttttgtaaaagaacactcaagatctgtatatttttaaaaaaaattctctcttcctaagatttcaaaatgagttttatcattaaagaaaaaaatgggagaaatcttgaaagatattcaattttacataatgcttatgggatcaccaaaaagtgatctaagatgacaatttgaaatttaccattaaaatattcttaaaaaattcattccattcaagcacttttgccgctcgttacgcttattttaaagggttggttttgcttctcagtttacacccgttttctaaatgaagatggtgttcatcatggccaatgcagaaccatgagtggcaagtctcaacggtggaggtcgtgatcttcgtcaaaacatcgaagggctgtgaaataatcgcctctgccaaaggaggaagatcccgacagaaatagcaattagtggagaatccaaaagtggctgagaggaggaaagggactcgtagacatggttttcataaaatttactttacacagaaattcaatcaacattatacttacttagcgtctgtttgtttccgcagacacaaataatttgcgcggatcgaattgggagagtctcgtttgatacagctaatggagggaagaaataatcttaaaaattggtgggattaattgtataatttttcgctatttttttatctctctataattttctttttatcttttctttatttctcttaagttaaacttttttacttttcactttattcctcttctattttcactttctctttttatttttatatattttatttctctcatctataccaaacacactcatcatgtacattaaaatttaagatcaaattacaaattcatcttacatcaatcattacaattttcaattactttctgatagataatgctatctaaaaatttgtcattgattaaaagtttattttacataatcaataaatataatttaactggttgaataaaatgtataaattattataaaaaaaattctaagataattataaatcaaaatcaatataatatatacttctagaatatacaagtatgtgttggataatttccattttttgacactttccatttttatttgattctgtttttatttgattgaccaaatcaaataatatttgatggcttaggcctagtccattgtaaacctaattcatcctataaatagatgagaaagggtggaagcaaagacacacaaattgagagcctcaagtgatagtcatgagtgtcatatttgagcaagccaccgtgcctgcatatttgagagcttagagtgaaacactgtgagcgtttgagtgaccaccattgttggagaggttgagtgtaccaccacattggtgtgtttttgattcattgtaaccgattattgttatattggattttgatactagactaggtcccgtgagtttttccttttctcacattgagtaaggttttctcacgtaaaacaaattctgattgtttttctctctctctctctctctccccctttgattttttgatttccgcttccgcaatttgatttaatttgacatttgagggtccgagatacccaacaatggtatcagagcccgggttcgacgggttctgaaggagacgagatggagaccagtggcataactcacgacggagatatgttcaagttgactgcagataacttcaactattggaggtcgatgatggaggatcatcgtatctgcaaggatccatatgatcccatagttttggaggagaagtcgactggcaagtcggacagggactgggagatcctgagtcgtaaggcggtggccacgatccggaaatacattgacaaaagcctctttgagcacgtgtccgagttcacgaacgcgtacgagttgtggaacaaattggagtccatgattcagaagaagactcccaggaacaaagcacacctggtccgccgccttgtgaagcttgaatacaaggatgacatgagtatgatcgagcacctcaacacctacaaaggtattgtgaatcaactacccaaagctaatatgaaaattgatgatgagatgcatgctttgttgttgctgagttcgttaccggaaagttgggatactttggtggtgactttgagcaactcggttccagaaggaaaattgacgatggatgccgtgacaaacaacctactgaatgaagaagccagaagaagagaacaaggtgtatctagcacgtttgaggctaacgttgctgggaacagaggaaagagcaactcccagggtcgtggcaagagccgggatcgaggtggatgagataggttcagaggccggtcaaggccaaagcatgacttgaagtgcttctattgtgggaaggtaggacacaagaagccagactgcaggactctgcagaataatgaacaaaacggctgtgtgaagccggatcaaattgttcccaaaagaagcagtgatcagagcaccacagcggtggctgccaacccgaatgccgagatattcctcctcagtgaggaaatgttgaatatagcccatgatgactgcacctggattgttgactccggtgcctcgttccacatcaacccatatgagggattcttctctgcctacaataagggagattatggtgtcgtaaagatggaaaatcaggtgactagtaggattgttggtattggtgatgtaacctttaccatagacacaggatgtcgggttacgctgaaggatgtgaggcatgtacctgacatgcgtttgaatttgatctcggttggaaaactagatgatgccgggtcagtaaattactttagagaaagtagatggaagctgaccaagggaagcttagtcgtagcctgaggaaaaaaagaaggctcattgtatgtcatgcaaggaaagaccagtggcggagaagccaattctgtccgagatggaccaaacttggagctgtggcacaagcgcctcggccacatgagcgagaaaggactccaaattttggagaagaaagagctattgaccgggttgaagggtcaagtgctggagagttgctcgcactgcctagctagaaagcagcaccaggtatcgtttgtgagaccggatcaacccaggagacggaggtgcatccttgacctcgtccatactgacgtttgctccatgtccgagagatcactcggtagagctcagtactttgtctctttcattgatgaccattgatcgcggccgtacacaaccaaattaattcagtttaaaatgtagtactaggaaagtgactcctaggtcgtctctcaaggatcaattgtcaatgtttaagggattgaaaacgtgttggggggatttttggcagaatgcgaaaactaaattaaacagaaataataattaattgcagtgattaaaaacaagtcagacccttagaacagattgcgcatctaatatccttggttcacgaaagataaattgtcctactcaattctcatcagtccagattaatcaactaagcgaagattaacctaaaacgtcattacacgaattaagcaaacgtgaacctcgttagggaaaactctcagaattaagcaaactgagaatactgaatcaatcaatatcaaaatcattaagcatgactctaattcgaaaaatacagaacagaaacccaaacaaggaagaacaagcagaaaacgaattagaagaacaagaacctccattaaaggtctgcaatctgtcctagggtccaaccctaggtttagccttccattaattcgaaattaacaacagaaacataaattgaattgaaacgaaacattaaacgaaattaagaacagaaacgaaattgaaattgagaagatgaagcagaaagcgaaaacaatactgaaactgaagcagaaaacaaaaatattaaaactaaaggaaaactgaactaaaattgtattgtaggttgtatgttcttgtctgtctgttgtgtgttgtgttggctcttgtgttgtatctgagttgtctgttgtttgcatgggcacagaaccctcaatatatagtaactgcctaacctaaaagaatgaaccttttcctaacaattttggcccaaaatcactaaagataagataagataaaataaaataaaaacgaaatccatattctgatatggaaaatattaagcataaataaaaacgaaatctataatttgatatgggaaatattaagctgatgctgacgtggcgcactaatcttcagtccataaattaattccaagcccaattaattattaatctgccctgaaaaatcaaattagaaataattaacttaaaataatccaaattaattaaaattcgaattattggtctaattaaatcctaaatgagaaacaatgcaaaatataaacaattaagcacaagttagggattaaaatgagtacagaaagatgagtaaatagtgataaatagtgactcatcaaaaccccccatacttagccttttgcactcctgggcaaaatcaaaaagtagagtagagcaaggaaaaattctaaagacattaaagaaagtgacacaccgtaaaataaacagttctacacaatccttaatgaaaactgggaaagagaaaagaattgacaatttccaacacacaaagagtcagagaaactgcacacttatgaaattcatccaagcattcaaaacttatcaaaacaatcaatccgctcaagaggtgaattaaaagcaatagaacctcactagatgcactgtatcacacactgtatctctcaagtgtttagtcaactgtatactctcaaaacactcatgaaaacaagcaaaagatagacttggcaagcctctataatcaacacccaataaacatgcacataaggatcaaaaggtcttttcagggttgtaatgtggccaaggacatgggtaggataaaatatgggataagtagctgcaaaccagagggactagaggagcaatggggaataagtaagaagtaagcacgaaaacaaacccaaaaatctctaatcagcctctaacaccattccttttcctttgcttcaaacacaacaacttttcttcaatttattatttttttctttcatttctatatttttctctttttcttttcttttcttcttttatatatatatatatatatatatggtactgactgatatatgcatagaaacatgaagaataagttgaacatcagagtaaaccaacaggccagagatatcatctaaaacaatatatacatgcaccccccttacttattcccaaaacaattccaaagctccaaaattccctaaggttaaggtaaataattgtttttcacttaaggcttgtaatgagcttcaaacaaaagaaaggaaattaggctcaacagggttgtcaaaggaattaaattcagggtaagcttatttggccagaggcttatcagaacaaaaatgccttaatcatatccaaacatgcatgagaaccaagaaatatcaaacagagtcaagacaaggcaactgtgcaagcaatcaagaggtatagcacacatgaaagaacagatagtggctcaaatcctcacacagggtatatctgtcacagttaaatcaacctttcaaacttcataatcatctttccaagtagagaaaaacatgaatttcaaaccatacagtatgaagcaactcttatctaagcatgaagtaggtgtcaacacttattcaaaatccagaaatcaaaaagaaacatgcaaaactattcgcaaaaataagacttaaaacaaacaaaacaagacaataaaactaatagaacaaaacaaaacaaaactaacaaacaaaacaaaacaaaaattacaataaaactaatagaacaaaacaaaacaaaactaacaaacaaaacaaaacaaaaattaacagtctctccccccccccacacttaaaattacacattgtcctcaatgtggcacaaataaaagttcagaacaatcagaataatgcaataaatatggacaagtgtgataaaaataaaggaggagaaagaaaagaaaattctaaggtgtagtgtaagatggaagggaggtagggtcaatcagagatatttcttccacaactgcatctagcaaagaaggattgctgagatggtctgctaccaaattctgaactccactccgatcacggatatccaaatcaaattattgaagcaagagcatccatctgatcagtctaggcttggagtcagtctttttcaacaggtactttagagctgcatggtcagtataaacaataacaggagaaccaagcaaatatgatctaaatttatcaagagcaaacacaatggcaagaagctctttctcagttgtggtgtagtttgcttgggcagcatccaaagtcctggaagcataatatatcactctaggcagcttatcaactttctgtgccaggacagctcccaatgcataatttgatgcatcacacattaattcaaatgggactgtccagtcaggtgcctggaggataggagtagtggtcaacgcttccttaaggtgatcaaacgccttcttacagctatcatcaaagttgaaatccacatctttttgcagcaaattggatagcggaagggccttcttgctgaaatctctgataaagcgcctgtagaaacctgcatggccaaggaaagaacgaacctctcgctcgcaagaggggtaaggcagatgtgaaataacagatacctttgcaggatctacctctatgcccttactagaaatgacatgccctataactattccatgttctaccatgaaatgacatttttcaaaatttaagacaaggttagtttcaatgcatctattcagcaccttatccagactgtctaaacacatgtcaaaagaggatccatatacagtaaaatcgtccataaacacctctatgcaattttcaagaaaatcagagaatatgctaagcatgcaccgctggaaggtaccaggggcattacacaggccaaaaggcatccccctataggcaaaagtgccaaaggggcaggtgaatgtggtcttctcctgatcctcaggagcaatatggatttgaaaataaccagaaaaaccatcaagaaaacagtagtgagatttacctgccagacgctcaagcatctggtcaatgaatggcagcggaaaatgatctttccgtgttgcttggtttagccttcggtaatcaatgcagactctccaactgttttgtactctggttgggataagctcatccttgtcattctttacaacagtgaggcctgtcttctttggaactacctggactggactcacccactgactgtcagagataggataaatgatcccagcctgaagaagcttggtcacctccttcttcactacatccagaatcaccgagttgagtctcctttgtggttgtctcacgggtttagctccatcctccaatgatattctgtgcatgcaagtggatgggctaataccagatatatctgccagggtccatccgatggctttcttacgctttttcagaacttgcaacagcttgtcctcttgatcagcatcaagggaagtggaaatgatcactggcaacctctcatcattatccaagtaggcatacttgaggttttccggtaaaggttttaattctggaatgggattgggctgatcagaagaaggaaccaaagaaggaagaaggatgggttccacagcctatacctcaacctgcaagtcagattcttatgtttttcctaaaacatggttagtgcattctgactctaaagaattaatatccagacccaatacctcagaattaatttcagaactagcatcaaaatgggacatatgttcatattgaaaatcaaggcaagattcattatcagattcatattcagattcagattccatgcatgcaagagaattgtataggttggatagaaaacactgtttcgtatgattggaagaataaaaatcggaaacatattcatcaaccacatcatcaagaatctcagcacggaaaacagaatgattttcagatggatgtttcatggcatcaagaatattaaaatgaacaacaatatcaccaaattccatagataatgtaccagcataaacatcgatcttagttcgggctgttttcataaatggtctgcctaaaatgagtggaacagaactattggagaatccctcctccatatcaagcacatagaaatcagcaggaaaaattaattcaccaaccctaactaagacatcctcaataaaacctttaggataggcaacacttctatttgtcaactgtattactacaccggtaggttgtaaaggaccaagaaacataaatttaaaaatagacagaggcataacatttatagaagcacctaaatcaagcatgactttatcaaatttattattaccaataacacaaggtatgcagaaagtacctgggtcctcacatttttcaggcatatctggaatagtattacctgtcatagaagaaacatttctgcccatgctgactctctcaattccagtcatcttcctcttcctcttgttagtgcacagctccttcaagaatttagcatatttcgggatgtgcttgatggcatccagcagaggtatattgacttctactttcttgaaaatctccaatatctccttatccacatcttccatcttttggtgattgatctagcggaaagggatagaggctgcgtgcacatcagaact

SEQ ID NO: 39 - DNA, 744080 bp, Glycine tomentella
gttttattaagggatatgttattgacactaccacaattgctaatgacactatccacatggttgtcatttacttgtatgtcatttacttgtattccaaaattacccactggatagaaacacaacgaaatcctatttccattattatttgggagtgcaaaaaaaaacaacaaaaatacgattttgttgtatagtgtacagtggaattgtacttttgttgcactcacaaagggtgaaaaaataaatgcaatggaaatacaattatgttgtactatacatcaacgaaatcatatttatgttctttttttgttttgtttttttctaaacggaaatgtattttcgttgtacactcctcccattcccttttcccttttcttcccttcctctacaaacacaaatgaatattgaccactgacaacaacatgaatctcgatgggtggcaagtttggatctcaatgtgatcgaggaagtgtgacgcagatcttgaaagtgggtgtgcgtgactgtgttggaggacgacattggggtgtgtgcactagacaaagatgaagatgggataccaactaaggagtgaggaagaagtctgagaaaaaggatggggaggttattggcactactaaatgagtgagtaaacaaagaattatgcatgtgttggtagtgccaatagcaaatttggtagcaaccataacaacagtcattcttgaggagacttgaatcctacactcccacaagtgtattctgcacccccctatttcgtttgaaattaccccactacccttaatgaattggcacatccctccccaaccctaacatctttctcctcaaaagcctaacacctccctccaacaacgcatctcttacctacgactcacctccttcccgtgaaggttgcttccttcctccttcatcttgaagttgtgcatcctttcctctttcattcctccttcatcattgaaggtaaggttctttctttctagtgtgggtttgggttttggtgggattggggtttgtttcttttttacgagttgggtttttgtaggagataggttttggtgagggttgggttttggtttggaataggcttctggaatggttactctgtaaaagccatctgtaatagccattgactattccggaatggctattctggaatggctgttccagaatagtcatttcggaagcctttgcctgttctagaatgcttgttctggaatgcatagaagacaggctatttaaatcttgtttgaaaatgaatttgagttgttgattatagtgatgttaaagctaattatcattaaattatcacaactgaattcctatgactaaaaatgatcaaggatcagcacaactttgttagcagttgattaggcattactcccaggattgtttctttgaattccctacattcaaactagtttagaaaatgtcatcgttgcctatttgaattttttattattagtgtaaaaattagaaaatatattctattgtttacagctaattatttcaaaggaatgtctctctctttttcttaatttacaatttattttctcatttatctatataacttataagtgctcaattgtttccatatcccttgttagtaatattttttcttcttgcaatttacttaaaaaaaaattaataatagcagttaatagaacaagttaatgtctttttcttttattatatattattagtgtgatcccctatagaccaaagttaagattatattatttatgttagtaaatttaatttgatttgtaccccctacaatttattcttagtagtttatttatgtgtagtttagttgtaatatgtaacaccccgtaggcctccgacgtgttatcattcataatatcagtttaacgtttaaaacatagtttataaaactcagcggaagctcagaatcgcttttcttgatacattatgtatgaaatcacacaaaatcacataaggcatacccctgctgatccagtttctcatagcataacccatacagacagataactaacagagttaggcagattcatcaaagatacaacagctatactcaggagaactcgtctcatatacataacatatctagttctgtacaaatatacatcagtactcacaccacatcgtttgacacaaaagaatatcatccctcgcaggggtatacagaactatactaatcatcaggagtacacacactccatccctgctctagggtacaaaatgtaatcaaaacaatccaaaaatgagcctatcagctccatctgctgccatcagccaagcaggaaagtctctactcgggcctcctgccctgagactgctctcttcgtccggaagagtcacctgaaaagcataatcccccacacggggtgagataacaaatctcagtaagctcagggtccatggaggcttctcctccaccctggcccactttcatagcacatatatcaggcaatcacaagcaaatggcccaccggcctggcccactggccctcataacaacataagcatagcatacaaacatggcggagctgcctcaacgcctggcggagctacctcaacgcctaaatcagtgggagtccggaactcgcacctgtgccatcccattgggtgctaacccttcgcatggatgcacaacatatggcacctccgagaaaagaaggagctacctcaacttctaatcccctggcctgtgggaatcaatcccctgggagctacctcaaccaagagccagccatgctagaaggaaaaccatctcctagggaggtccatatctatctattggccaacagatctatcacagtcatatcacaacacaaactcaagcacatatgcatacatacatcattatgaggatgcaattaccaatgcatgcatcatgaaatgaccaccactcccctggagtgtggtgtggcacacaagatgggaattcatcccccagagacactgaacttacctggtaaggtctcagtcagcaattccttcccaggtctgtggctcccgccaacaatagtctcacaatcaatgcctaaccaaggcatatgcaatttcacatcaaaatcagaccacagacatgaaattcacaatatatatatacatatatacagaaatcccctatcctagggttcaaaccaactcagcctacactaggctgctctaagaccattcaaggtccatcaggatggaacacaatccatctgagtcattctagactcgccacacatatacataatctaaactttactcagcctcacaattcaattgttatcagaaaggggctgagatcctctcaaagccctgttctactagcctcttagctcagagcatcacaatcaaggctctagcctatcagagaaccatcaacaagtgactctacataagccacataggcatatacagagccaagattcaaagttatcagaatcgaaaactgaaagttaatccttcatctattcaaagccctgaacaactttctcaactggaccctgggctaattctagccccagctcatatgggtcactattcacagggacccccagaatcaaaattaaacggtgaaacttgcgtttcttacctcagtggcgactccaatagcttcagaacagcttctcctagcttttatgttccaattacgctgtggttctgcgccaagctcgagttctctgagcttttccctctgaggttcctcttctcactcaatctggggtttttaaggaaattgatgaaggattcaagctttctactcggctcaaacaagtttctaaggctcaggaaggtgtttaggctgagaaatcaagtcctaggaagctcaaggacttcaacaatggaggttggctcaagggaggaagaagaaatggaatttcttccattttctcacgttttggcctttaaaaactggtctgccgacgttcccacgcgactcacttgacatcccacgcgtttcacttgagatggcagacagaaatgccctttctgagccacttcccacgcgactcgcgtcgtttcccacgcgactcgcgccatacattcgggccttccacgcgacacgcgtgggactcgcgtggagttccagtgcaaaatcatgctttctgggtcacttgccacgcgactcgcgtggatcttcaagtgactcgcgtgacatggcagagccatctgccctgtaaaacacatatggcgcgtgtcgcgccacacttcaagtgggtcgcgccatatgccagagccaccttaaaatttacattttaaacacctttccaaggattctaaagctataacctttggcgccatcaacgccaatcttggcgccaccggcgccgcacccttagtagggttttctgacctgaatccccgcgctatcgcgcggggttaagcgccgaaaataaaagtccttacataatatcttatgttagtaaattaatttttagatggatcgtacaaaaagggttagttttgatggtgatgatggcaatggcagatgtgttagacctataatatcaaaacgaaggcgatgtgtaggagctccaatgatggaccctttggaccaacttgccaagtagaggctttggggcatgttcagcctatggagcctgttgacaaccatgagctagaagcacctattgtattccctggtggccctgaggacacgtcacaactgacttcatatgttgatcatgtggcttggaaattatggagtggcatggtaaactactaatactaagtttgtttcaatatttataattgattaactattgtaagattcttttttggaacttatttagtaattatctatgttcttgcaggaacgtagtgagctatagttagtatcacgtgggagaaagtttcagtcagatattgtcctacatgaccagatacaggatgtggtcaaggggttcattttattttcgttgacaacatgcagttatcacaccatagacaagggactcttgtctgcttttttcgagagatgacatatagacacaaacaccttccattttcctgggggagagatggtgataaacctagatgatatgacgtcattgctttacattcccattacaagaaaattttgaacatatggataaggaagtggcaattcccgtgcttgttcacttacttggagtttaatatgatacttcatttgatgagacaaagaaaacaagcgatggacaagatcttacaatgcatccacaacgagatgtgtctacaccaacaaattgtattctatgaacctcatctgcaatatgattcaatgcataccttggagcaaatccacgcaatctcttatacaattgtacattaaaagtcaacaacgtgaatgctatgttcaaatgaggctttaatttgattatgttgcataatgatcatgttgttcattgcatcccaacatttacacaagtctcccatgctagtatggagcaatagcttcaatgccctataggcagacttaaccctacaaaacaagtttgagaaaagcgtcccaataaaatgaacattgtctacaaatactagtttaatgaaattattgtttgaaacttaaacataaaaatggagaagcttaagaaatgatgatgaatgacgccacgatccgtaacggagcgataagtcagaggaggattcgccacaaaggatccttgataagaatcaatttggtttcactcaagaaccaacaagaggcaaagctctcaatgcaagcaaaatgcttaatttcattaatcaaagttgtccaaaaatagcatattctgagtacttatagagctaaagtctctaataatgtcataaaaatgtatgtttagaactatttttggtaatattaaagcccagtacaaaaacaaaacgattataaccgaatgtaatcgattaatacgacctgtaatcgattaaaacagagtgttccaatgttgtgtaatctattacagaaagatggtaatcgattacaacaaacagaacttgcttagtaatctattacaaatagatggtaatctattacaacaaacaagacttcttttgtgtttgcactgagttggtgtgcttcttcatgcttgtccacaagatacaagttagttttgatgtggttttgaagaagcttcggtttggaccttgtctttggaccttgtcattggacccttcaattcatggagtacttctagaacttcatgatctttggatagtcctctatcagctctccttgagtctaacaaaatggacaggtgaatgtggtcttgtgttggtcctctggtgcaatatgaatctgcgtgtaacctaaaaaaccatcaagaaagcgataatgtgatttacctagcaacctctccagaacctaatcaatgaaggagaaagggaaatggtccttgtgagttgtctggttaagtctcctctagtcaatgcaaactcgccaactgttggctactctagtcagaatcaactcattatcctggctttcacaataatgatactcgacttcttagggaccacttggacaggtgaaacccaaatgctatttgaaatgggatagatgatccctgcagctagtaacttcatcacttctttcctcaccacatcaagaatagtggaattcagcctcctctgtggttgccttatcggcctagaatcatcctccaagattatccaattcatgcaaatggaaggatttattccaagaaggttagcaagtgtccatccaatggcctttttgtggcctctcaaaacatccaacaacttctcttcatgcttaagtgacaggatactagatatgatgactggaagcttctgagcatcatctaaatgcatatttaaggagctcaggtagtggcttcagctccaaggaaggttgttcaatggtcgaaggcaaggaaaggttggtggataatggaagggagatagaagaatcagaacttgtatttgtacctacacctgcaacacaatcagagtgaaatgcggaggacatctcctcacaaatactacacgctgtggcagaatcatcacaggtacaattacaagaaccaaaatcaaaatcagaaaaatcagaaagtaaaatatgtacaaatatctacactatctacaacaacatcaaggatataaacaagaaagacaaaatgctcctctacaggacgttaaaggcctaaaaaatgttgaaataaacaacgttatcaccaaactccatggaaagagttcttgcatgcacatcaattttggtcttggttgccatcaagaatggtctccctaagatcaatgtggaaccatggctgaaaaactcattctccatatctaaaatgtaaaaatctcctggaaaaattaaatcattaactcgctctagcacatctttaataagtccaagtggaagtgcaacactcatattggctaagtgaatgacaacaccagtgggttttaaataaccaagatgtagtgatttgtaaactgatgtgagcatgacattaattgaggctctaaggtcaagcatgacatctataaaagtacaacatccaatggtgcaagggacaatgatgaagcaaatggcaacaacagttttgccttgtagaaacatttatgtccatattcacttgctcatctcccttcagcttcctcttgtgggtgcacaaatccttcaataattttacatatttcggaatctgtttgatggcatccaagaggggaatgttgacttccacctttctgaaagtctcaagaacatcagaatcaagctccactttctttgcagaaatggatctagaaggaaaaggtagaggaatctgttttggtatagaatctgttttggcaccataataaacttttgcaccagcatcaattttggcacaaacaattgttgaatttggaagctccgtgccactcctcaagataatagcaatcacattctttggattaataattggttgtgctggaatattaccagaaccttgctgctatatctggttaacagttgtagctaactgtccaatatgagtctggaggtcttggatgttggcgctgacattttgttgatatggaatgttgttggttgccatttgcttcatcaggtcctccaaggaaggtctagaactgttctgcataggttatgcaggtttaggtgcaggctactggaattgtgactgttgtctgaatgggggagcttggtatttgctggtggagggttgatattgttgttgttgaggtctgaatggctattgttgtatctgctattgttgttgtggaccaggaccatacctcaaattcgggtgatctctccaaccaagattataagtgtcggagtacggattatattgttgttgttgagttctgaatggctgtccaggttgtatggcagaaacttcaacagcttgttttgtttcttggaaagtggggcatgtatctgttggatgatcaggtgcataatagataccacacaaccttggttgtttggctgtcatcacattctgttgtcgaccaatggtaagttgtctcacaagggatgtcaattctgatagtttattatccaacctctggttatcagcaaccatagaaacaaaaacatcatttgcagcagccttggatgttgtagtgcctctagtaccaaattgttgataattggctgccatgttagaaattaactgtcttgtagtaagaggagtcttgtccatcaaagtgtctccactgactgcatctatcatactcatgtccatcaacatcacatcttcataaaaatactagatcaataattgctcacttatttgatggtgaggataggtagcacacatcttgttgaatctctcatagtactcatataatgtctctccaggtagttgccttataccacatatttctttacagatggatgttgctttggatgcaaggaagaatttctccaaaaatcctttcttcatatttgtccaagtgttgataggatatggttgaaggtacaaccagtccttagccacatcattcagagagaatggaaatgtcttcatctttacatagtcctcatgaatgtcatgtggtctcatggtgaaacacactacatgaaactctttaagatgcttgtgttgatcttcacttgcaagaccatcaaactttggaagaaaatggatcagtccagattttagctcataactaacatcagtctcaggatattgaatacaacaaggttgataaacaacatcaagtgtagccaattccttaagaattaggttgttataagccattgtataaacaaaaatttcaaaatcaagatgttctgaattagaaacaaaagactcagaaacagaagaatcaaaatacactatattactatctagaactacactatcatgcactacacttttgttatttatgctcaacttgtgaaatgtcctatctatctcaggatcatatgaatgcaagtcacttgatttggaccaagtcatgcatagttccactcatcaatgatagaaatcacaaaaatgtcaaaaataacagacagctactctaccaagacactattcacaatatctactaaaatgaaacaaaaaaaaatggaaaactacccccaaacaattttaaaaaattcaaaaacaccacaataaatgtctaaaaatcatgcttgatttttgtaattttttggtgattttaaaaaatcataaaaacacaaaataaattcaaaagtggcctagatcattgaatttggcaatttggacccacaatgactgtgttcgtccctcacaagtcaacttgatgtattaattttttctacattctggtaaattttcagcccattctgagattgtttgctatgaaatgaccagaatgcccctgtgctaaaactcctacttagaggcggaagggataaactttggacaccaagttgcacagccaaactccacaagaaatatcacttctggaatacacaacacacaactacactacaccactcctctctctactaccatgtttttttcctctgttttttttttcatttttgcaccactacttcacacactacataacaacaacaacatcacacaatgcaaataggcagcaaagtgcaattatgcaacagaatgcaattttttttaatgtcaatttatacctatactagtatctaattatgagtaaattaaagttagcacacaatgaaccgtatccccggtagcggtgccagttttgataactgatgtcgcatcgctttaaaacaaataagttatgctaattctgtaacacaagattaacctaggtcggcttagagatacgatcaatttggttcaaacagtttgtaggcgatgaacaaaaattgtgaaaacacaagctaaaatttaagaaaaaaaatgtggaaactgacagaattaataaaagatgttgtaaacagattcaagaatatcaatccaattcaccaaaccaagcaatacgaattatcatagttatcgtataatgatcttattatgaacattctttcaatgtcattagaagtagttcaatcgaataaactactaaattaattgaaaccacaaaattaattgaaatatcatccaaacaatctgttattaaaattcaaaattaggaaatgaatccataacctaatcctttttcaatcctaaacacattcataatcatgaaaatcgaataaaggattgaagaagaaaatgaccattcccacagaaattgaaatatcaaaccagaactcaaattctccttgcttggattagatccttggattgattgattgtttagccttccatgatcatcatcagtggaagagccacaagatttgtgcaacaaaatagaagaacaaaaatgaaaatgaagaagaaaactaaagaacaatgaagaaaaattgagagaaaaagagaaagaaattttaattctggaaacttctaaaaaaaactacaaattttgtttgtgctaaaatgaagtgtatctctaactaactaattgaactaatataaagtgaatgagtcagtaggaaaggatgggtcgtgattagacttatctaatctaactaattactaattatgctaattcgcagcccaaaactcaagtgcagagattttgaattccaagcctaaaatgaccctcaaaatgacagaattcgcctcgacttatctctgaaaaaattgtaactcttttccttatctttctcaggattactcatatgagccatttgaagttctatggaactctctaggtcctgcacaagggagaaaggtcaagtaagccaaaaaaatctgaaaataagcaataattatcaattaagcgcaattgtttgcctaagacaaaaactgagttagagtgagaaaataaaagtccaagagaagtcaaataaactaagaagaatagaaaaatgttaaactaaatatgcttaatcaagcagctagggcatatttttttgcatcttataggttgcacaatctttgctaacaagagtgacatacatatttgtgtggtatttcttggacgcatttcgtgacctgcagtagtctagagggttttaatgggtagcggttgcactccttcacatgtatgataatctaaattatgcatctcaacaccgtgtattgggaacatgattgaagatgacaactaccatcaaaaccaaccatgtgcctttcgctagaagaatgggaaggcattaccagtgacgacctatcttaagtggttgggtagattgatgacagatgttgtttgttggacaccatacactattcaccatgggttcaaagaatttgagattatttctctattttctggacatatcagatgggattcgtacattgttagacaccaaccagagagggtgttaagacaatttggattttttcagtcaattccccaacttcaaagctctcaattcccatccacataagaggttgatgatagattgctccacttttcacaataccttgcaacgactgaggactttgttatttttcctagtcagggtgttgtcgggtatatggagtggttttatcaaatatttcactcattcatgagtctactacaacttgtggagcctcttagacattctcatatggtacatcatcctttaccagatccaccacatgtgtttcctgatgatacaacacctatgccacctccatctatagtagtgcctgttgatgctgagatgcctcgacttgcagtggtataatatacttatatttctattacataatttttaataaaatattccaaatttattaaaattttgttgtcattgtcttaggttgtatgctaaaagatgtaacaccccaaaatttagggaattgcaattattaagaataaaatgttaatgaaaagcggtagaaaattaggacaaaatgacaagaacgcccctgaacaaattcagaaatgacgattatgtcctaggatgaaaaatgacagttataccccggacattttggaaaaggaccaatatatcctagatattttgataaagatatttttgggagaaaattacaaaaaggcccttgaacaaattggataattaccattattgtaacaccccaaaatttcagtcaatgctagggtaaaatactaatgggaggtagtacagaagaatttaggaaatgccctgaacatttttggaaatgacgattttacccctagagtgagaggtaaaattaccaaaatacccctgggtcaaaactgatcaaaatgattttagaaaattatggaaacctgagaatgggatagaatatttttagacagcacattattaacatgattgggattagaaaatcctaaacaataatttttaggaattttgtaagatattctgaaaagagctcaatctagacaccttcagacatcagaaaatttcagaaagataagagatataatccttggagttttcttgtaattatgggctaaatagactattttattaagatagtttagtaattttattaattagaaattgaccaatataagaacaagattgttatgtgatgaaaccaaaggaaaataattagaagacttgatttaaaagctagagtgccacggtcaatgaagaggaaaaaatctgcacaagccttgaatgcttgaatagcacgtaggataactaagaaacaaggaaacttatgtagcaagcttagggagattttgttagacaaagagaatcttcaattaatgcaatgcaaggaagcaaaattcaatttgacttcctcctcctccaagcatgcaaccgtgcagatttttttggggtcaagaagtcaaggttttaaccaattaaattaaagtaattaggaatcaaaagaaattactaggtcgcatctaaatggttggcacggttaagaagtgggaagaaagaaaaaatcaccaagagcacatgaaagcaagaggtcaagcttctaaccaatgaaatttaagcaagcaagggattatgctagataagaaaaaaaaatctgctgaaccttatctcatgttactccatccgtgcaaaattattgaagcaagaaagaataagtgggccaagggagctaagttctccaccaataggaatcaagccaactatgttataaaaggaatgaaagagaaaaatttgggtcagcacaaggagaaaccgtgcagctactacctcacttccctttgttatgcttttaaattaaaacaccaaaggaagccaagaaagaaaaactgaacgtgcagcccttgtctccctcacttgccttttggttttcaatcttattgactcttaaatattaagccttaaccactccctgctatccttttcataatccaaatcacaacaaaaaataaaacattccaaggagcttaaagagtccacgtgaaggtaggaaaagggagcaagcttcttcaagtttaaggaaacatttgaggtaagggggagttttgttagataaaatttaaatattagcttatctctaaatagattttaagatctttcattacttgaattatgatggagttaagagaaaattttaattagatgaaggaaggaagccacaattaaatacttagtttctatggttaaaataacatggttttaggtagatgatttggacaattgaatctttactatgttagaattaaaactaagttcaaagaaccctaggatagcatgccatggtagaaattttaatgaactaaaattggttacataatggctgttgtagtttaaaggtattgctgtatgtataataagatttttggaattagttgttgtatgtaataaaattaattgatgtagcatttattagttagttgctgtatgaaataaatttaatttttgtagcacaaaatagttagttgttgtacgtaataaatttagttgctgtaacacatttaagttaacgtattttagttgctgtaatgtatgtaaatacttgagtacttcggtatgtaagtatgaaattaatttgtatgctgttgtaggttggggtatttaattagtatgctgttgttaaatcacaactgtatgtggtaattgatgaatctgtatgttttaattaagctgtaaattagtaatttcatatgctgttgttgctgttgttgattgctgtaaattaataattttgtatgctgttgttgctagttgctgtaaaataatcattctgtgtgcgtgctgttgctgtatttaaattgttgcatgctgttgctgtatttaaaacattggttgttgttgctgtatttaaattgttgcttgctgttgctgtattcaaatggttatggtgacaggagtacgtaggtataataatttctaagtacgtaaccaagatttaaggaaagaagtattaattagtgtgatatacttgtgtgatcctggatataggattgaagaaactaaagttcacaacttgatgaaaagagtacaaataatgatgttgtggtaaacaatggagatataatttgatgataaaactgtaaacttgtgatgttgagatgagattgtgatgttgaattgtgatgttgagatgtgatttaaggggtgatcatgtgataatgaggatttgagaatcatgtgatgatgatgatttaaggaaaagagatgaaaagagtatccatacatgattcaagatgatgaaataaaaagtatcatgtgatgatgtgaatttgaaatgaaaatgatgaggaataaaagaagatttaaaaagatgaaaatgaatcattcatacattttcatgtgcatgagatgatcctcgcaagaggtgtaaaaaggtgatcctcgaaagaggtgtaaaaaggtgatcctcgaaagaggtgtttttgtcagataactaaactgagctccatacgtgttttaacttgggggtagttgagacagtggggaaatcacttaaccatgatgatcacatggatgagagtgatgctcctgcgcgacactgggctaccctgacgggatggataagttcgttccactaaggtgagggtggggttatctgacagtggccacaatttttagatgttgctgagatctcagtcatgcatcatataataagatgagcatgcattttctttcatttcataacgagagggtgagaagagaagagatgatacattggaggaaataataatgcttagtaatcatattaaataaatcctctgtattaactttttacgtatatttatatctgttaatatttaaattttgtttatcaagactgaccccattttgtgtcgtgtagttgacacctgtgatgaccccaaattatttgggcgagcagaaaacagtaatatggatgacgtacaagaagagtgaagatcgggtgctatttgtctgctttttgaatgatctgtatttgggatgtaacatggactgtttatatatggaactctggctatgtaataaatgatgaacagtacggtatgtatgaacgttacgactagctaatctaaataacgcgtaaggcacttaaattttctaaacttgttttaaaaaaaaaaaatccacggaatttccatttgaaccttcatttttaattcgttttgaaaattaaccaaggttcatttgaactttcattttttctgttttttgaaaaatttttagcaaataaaaataaatgcgtaataaaaagcgaaatagaagcggttgttacaattataccctaaggtgataaatgaccaaaatgcccttgaagtcaaaactgaccagataaccttagaaatttgtaagaacctcactattggataaaatacttttagataatcatgaatcagtcaggttgggggcgaaaaaccccaagatagaatttctacaaattttggaaattagattaaaaagagcttaattcagactaccctaggtatcagaaaattatgagaagggtatgagtataatctatggaattttctcttaattgtgggaggaaaaggattcttaactaggttagtttagtaattttaataattaaagataatatggaccaataagaattagaagttagctattatgggaaaattggattaatatgaatttctaaactaagccttgaccgtatgatacaagatcaatggaaaaaaaactttaagaaacttcaagaacgcacacatggatagttaagaggcttggaaacatgccattggtccacttgtatggtaaaaatttaatttaagtagatttttatcttgtttccttaggaagaacacgtgggaagctctaaacattgtttcaaagatcccaacggtcaaaagctagatatgttagttaggagtataccattaaaatttaagaagatccaacggttaatgaatccagaaccactattttgctaatacgggttttaagaaaagttaagaataaggaaaagcacaaagtatctttaaaacactagctatgccacaaagttgatggaaattactctccaagctgagcatactcacgtacaaagctaaatagcaagagagaagtgtaattaggacacatggaaggaagggaaacattagccaataaggagaaatcacatgtaaagcaagtaataatcacttaggaagatattttggcacttcaaaatgtaggaaccgaaaatgaactcagccataggggaagtatacgtgcacttaagaaaaggcaaaggaggtgtagaataatgtagaaacaagccacttgtacaaaggaaaatggctagccaatgggagatggaacacatggaaagctagtaggatattttgaataaaaatcaaagaccaacaagccaataaaaaggagcaaaaccgtaagcatgggctggttggagaatatacgtgaaaattactagccttatatcactttgcctttgtccaagcatttttaagaatatcttcaaagcaaaacaagtgcaaaccgtgcaaaacattagcctaaagcctttcatttcattctttcctacttcatcttttaccaaaacacaaaacctagcccttgaaatccacgtgaagactagtcattctaggagtaaggaatcattcaaattcaagaaagaaaaagctgtccaaagcttaaagaaagcaaggaagcaagggttgtccaaattagaaggcaaagcaaggtatgggaagtactttaataaacatgaattaggtagttgattaggataatttaacttctaatcttctaggattaaagctatgtttaaagtaagcatgccatgtgtttgataaaaatcctaaatgaagtaaaatgattaattctattttgtagcctttgtaaattaattatttgatgaatccttgatttaacgtagctgtatgtttttatttcttagtttggtagttgctgtatattttatttcttggctgtattataaatttaaacgattactgtatgttaatttatttgtatttggatactgctgtacttaaatattgttgtaggctaatttccttagttgttgtaaattaactcaataaagctgtatgttgttgtcgtatttaattaaattgatgctgtatgcatgttgttgctgtatttaattgaattgttgtatattatttgttaatgtaagctgtatgatatgcggtatgtggctgtaattaagaattgatgttgctggatgctatattaactaaataatgcggtatgccattttattatgttgctgtaattaatgattactgtatgacactatgattctgtatataagggtgttgtatgtcattagtatgttgctgtaagttgctgcacatataattatgttgctatatttaaggtgctgtatgttgtcttgttatgttgagtgtttccataaagcacaccaagtgtttgataaaagatttcaaagaaataaaataagtatgtgatccttcaaggcatgttgcttggtgatgttatgcttttgatgttgagaaatttataaaggtgggaatccttgtattattaaagatgttgtgattatttatggattccaaatgttgtgataaatcatggctgtatattgagactaatgtgtaaaagttttatgtgataagccatgagttgtaatgatgtttaaaaattggataaaataaatcattcatgcattctcatatgcatacacctggcgggggttaatccgtggagttgtgtgtcagatagttagaggaactgagtatgagcgttcagacagtgaagagtctgagctgggggatgcttcggcagtggggaactcatgccacccatgatgatcacatgtagtgtgggtgactttcctgtgcaccactgtgacatcctgactgatcatgcaagttctggaccagtgattggggctatctgactgtggccactgatgtcgatttttatgagaagctgagatctcagtcatgcatcatttaaataagaaaccatgcatcattcatcatatattggttctataaatgttattttatgataccacatatatccgctgtttaatttaaatctgttatgtatttgatatgttattctgtttcctatcgattatctaattatgtttattaaaatacttacccgagttgtgtctgtggtttgacacctgtgatgaccccaatttatttgggcgagcagaggaacagtgaacgctgagatatgaagaagcttggatgacttgcttgctgtgttttgacttgatgagtggatgatctggtttgatgttgccatttttgtgaattatggaagtcgtactgtactgtatttgtattttattttggatgactgtacacggactgctatatttagttatgcttctcattataaataaatcgtggtgaggataatcgtttatgttacttacaaattataaaattagcaagcaaagcgaaacgaatttttgtgaaaatttttttatactaatctaatttaatacaaagtggacacgtaattttatctaaaatcaaccgagcacgagagagtaacgagaggcattacaaaagatagtagaaagcttgcagcacatgatagatatgaggatggttactgtaacgcctctctttactctctcgtgcttgattgattttaggtgaaatctcgtggccattttgtattagaatcatgttatttataaattttacataaaatttttcgctttgcttgcaagttcttggttcgttcgtaacgtagacgcttatcccccgctacggttcaattatgataaatagatacagttcataatacagtccaaatatacgtccaaaaatatacagactgtctagttttaatacaaattacaaagaaacaaaatacaccaaatacaaaattacaattcatcaatcttccttatcacatctgcttcaatatcatccatagcttatgcttcactgttcccctgctcgcccaaatgagttggggtcatcacaggtgtcaaccacagacacaaataggggtaagtatatgataaacatagtttgaataagacatatataacacagatggataaaaccttaataaaaagatctcaacagatacaatatacagaacatcatacacatacccattatgtgatgcatgagatgcatgctcatctttttatatgatgcatgactgagatctcagagtcttatcaaaaggtaccaaaatcaacatagtttcacccactctagtgacacagtcccacccactccagtgaaacctccctccactccgaggggataaaaagtgtaccataaaatagttccacccactccagtggaacagtcccacccactccagtaaaacctccctccactccgaggggataaatgcaaatggaatatgtaatggcttgtttttttattttttgtttttctccatttattttatttctcaaattctcatatcagataattccacccactccagtggaacacatctcaaagctcagcatacagccatagttcaatatcatcaacatagtacacatctttatttatcatcatcaaactcataaaatcacttaaaattcatatagattcataaagcaccaatcaacatattattcttaccaagatctatagaatcactcaacaacccataagctttgtaaaatcatatacaaccacacagattccaccacatcacacacttttatttctttgaagtattttatcaaacacttggtgtgcgtttatggaaacactcaacaacacatgaaatatcacatcacttttgctaaagcattaaaccatgcaaatataatttaaattcaacaacaataattcagaccaaccacttactagacatattttattcattggaacaaattatcaaacatatggtgtgcaacttaaattcatagaattcctttaaagaaagccacttaaccttaatctttataaagcttcacatacttctaagaataaataaacatgtttccaacataatcaagttcaaagatttagaaaaatacttgtaactttaattccaatcttcaatcaccttctttaataatagtcataatatacataaacctaagtcacttaacatcacttattaagtttagattcaagttattcattcaaaatatcattcaataactaagatcaaatcacttattctaatagtctttttatttagcaatctttaactctttgaggcatttcatcaaacacctagaatacaagacttaatcaaataaagcaaggagtaatattcaaactaagctatcataaactcccccataccttgtttccttaagcttttggacaaccatccttctttgaaattgaatgatccttgctcctaaggttgctagttctacacgtgagatttcaaggtataagcctttgtttggtattctatgtaaatggtggattagaaatgtaacacctcgtaggcctccgacgtgctatcattaataatatcagattagcttataaaaaaaaaaaatcaatttaatcaattcagcggaaacctaggatcgttttcttgatacattaagtatggaaacacataacagaaccataaaatcaagcccctgctgatccagtttatcaatcaaacataatacagacagataacaagttttataggcagagtaaccaaatacatcatatatactcagggaaagttatatatacatatcatacaagttctgtacagacatatgcatcaaagtccacaccacacatgtcgtggtgcttccaaaagaatatcagccctccctgagggtatacagaaccatacaccaaaataaaacaaaaacagagccttcaagctcttcatgccgcttctccctcaagcagcctagtctcaattgggcctcctgccctgagacagatcttctcgaccagacgtgtcacctgaaatcatgcaagcccacatggggtgagataacatatctcagtaagctcagggttcccgggaattcattccccaaaacactgaacttacctggaacaatatcactctgtggtctagtcccagctctgtggctcccgccaccagtaaactcgggatcacggcctaatcaaggcacatgtaatttcatatcaatctcaagaccacagacaggaaattcacaatatatatatcatacagaaatcctttatcctagggttcaagccaactcagcctacactaggctgttctaagaccactcaaaggccatcaggatggaatacaatccatctgagtcattctagactcgctacacatatatataatcgaagctttactcagcctcacaatacaattgttatcagataggggctgagatcctctcaaagccctactctactagcctcccagctcggaacatcacaatcaaggctctagcctatcagagaaccatcagcaagtgactctacataagtcacacaggcatatacagagccaagattcaatgttatcagaatcaaaaactgaaagctaatccttcatctattctaagccctgaacaactttctcaactgggcccggagctaattctagccccagctcatatgggtcactattcacagggacccccaaaaatcaaaatcaaacggtgaaatctaagtttcttacctcagtggcgcacccaacagcctcagaacagcttctcctagcttccacgttccaattacgctgtggttttacgccaagctcgagttctctgagcttttccctctgaggttcctcttctcactcaatctggggttttcaaggaaattgatgaaggattcaagctttctactcggttcaatcaagtttctaaggctcaggaaagtgcttaggctgagaaatcaagtcctaggaagcttaaggacttcaacaatggaggttggggctaagggaggaagaagaaatgctatttacctccatttctcacgttttgggccttaaatcctgatctgccgacgtacccacgcgtttcacttgggttcccacgcgtttcacttggtatggcagacagaaataccatttctaagccacttcccacgcgactcgcgtcatgacaccacgcgactcgcgccacttattcgggccttccacgcgacacgcgtggatcccacgtgactcgcgtggagccccagagaaaaacatgttttctgggtcacttgccacgcgactcgcgtggatcttcaagtgactcgcgtgacatggcagagccatctgccctatattacacatatggcgcgtgtcgcgccacaccccaagtgggtcgcgccatatgccagaacaaccataaacttgcattcatgcttaaactaagcttacgaattcaaactattacatttggcgtcatcagcgccgatcctggtgccaccggcgccgcacccttagcagggttttctgacctgaatccccgcgctatcgcgcggggttaagcgccgaaaataaaggtccttacaagaaaggaataaagtagaagtattttggggctggatgttgcacgtactcttttccctcaccagcctatagtttcggttttgcttccttttatagacttgttggctttgatttttgttacaaaatatcctactagctttctacttggttctttcctattggctagcctttcctttgcctccaagtaccttattctacattcttctccttttctttctcaattgcatgtatcccttccccctttggctgagcttatttcggttcttgctccttggttagtgcaaatatcttactaaattatcattgttaacttttcttatgtttccaccttattggctaacatttctccaccttccaagtgtcccaatttcttgaaacttcgcaataattcccctcctttcttggtttgcacgtggtctagcttgcttaaggtgcatttcctttggtttagggacatttgggtttttcttcattctttattcttaagtttttcttctaaaacccgttttattaaaatactcactctggatttgttaaccgttggatctctttaaaattttaagggtatacttctatcccatatatctaacttttgaccgttgagattttcgaaataatgtctctagatatccacgtattttgccaaaggagacaatataaaatttgcttcaaatatcttttaagcattaattactttctttacatatggaccaatggaaatggctaggcttcttaactctccatgtgtgcattcttgaatgttcctaaggcttttctcccttgattgtgtatcacacggccaaggcttgatcttagataaccaaatcaacaattttccttttattacatgtaataacaaaattctaagttcttattagtccaatttgcttttatttagtaaaattactaaactaactcactaaggatcctattcctcccataattaatagaaaactccatagattatgtctatcctttttcttatatttttctgatacctgaggttgtctagattaagctcttttcaacctatcttccaaaatctgtaaaaattctattttagggttttctgcctcccaccttgctgatacttggttatctaaaagtattttatcctatagtcaggttcccacaaatttatgaagtcatttttgtcatttttgacctaaggatattttggtaattttactactcactctaggggccaaatcgtcattttaaaaaatattcaggatctctctgtaattgtcactctaagggtatctttagtcattccaaaacatctaaggatatttataacattttttccttaaaatgtctttactggacttcctagggcaatttggtcattaataaaatatccaggggtattttggtcatttattgcctcagggacctatctgtcatttctgaaattgtcaaggacatttatgtcattttcaaaggacatgtgtgtcttttttaaaacgttcaagggtattttcgtcatttctcccaaatcttttgtactgcctttaattgactgtgattcccaatttttggggtgttacagttactgctagtacaaatgcatataatataaaagaccagtgtgtaagattagccaggggtgtcactgagcactaaaatgtttatgccggtcaagacgaaggagggatgcacaggggagacatggtggtggacaaggttgaggatgattttattatttcgatgactatatacttatgtatcccaactatttatatatgactattataattgtatgcgtttaatttagatggcacaatgactaatgtatgcgtttaatttagatatgaccaaggttatcaaacttgcgattttacgtaaactcgtggaggtctcttaaacttgattcatagaatcgactcatcaactcataaaagtttactcaatataaaaaatatatagtattcatatatataaaatcataactaaatatttcaaccctaaaataaatcaaaatagcaaactttaacaataattcaataaactaacatagtccacacccaatcaaacataaattcatacaatacaaaacataatatcttaaaataaaagcatttaaaaaacatagaaataattcaaatgtccatcaatcctctaattaaatcatttccaatatcaccactaccaccatcatcttcatctccatcatcttcaagctcttccttggttaaaaaggaatcttcaacattgtcattcaaaaccaaattgtcaatatcagatacatccaaagttggatcacttaaacttcctccaaccaagtcaatattgcttccattaccactttcacctataggctgctcaacttggacattgtcttcatcaaaaatatcatctcattcttttgttatccactcatcatcaaatttcatatcttcaaatggatgagcaacaatttttcttatttgtctatttttcaacttcaagttgtacatcacataaactaagtcattcatcttcttttgatgcatgtagtttctcctctttgtatgaacctataaataacagaagaaattgaagttcataacttaataaagtctagagtctaaactaaacaaaacaaatattaaaaaacacaaaatcgtaaaatcatacgattctaccgagtttggtccgattctaccgagtttactctgagtctaatagaaaatgatttcgggtgcgattcaactcgttggaggtgtgcagactcataaaatcatacaatcttacaatttaaaacttgagtttgacaaccatggatatgacgattgtaattcttttcacaaaaattgtcttcattacgcatgtctaagtaataattcaattcacaaaaattgtcaccattacgcatatgcaacttacaaacatataaacaataacaaaatgttcaatcttctcctagatcaacatgttgtatgcgcaacctcatgaaattagtatattggtgcattcaactaatataaggagtaggccactattttgcttgataatgacaatgtcttgaccataacaaagcagttgacggcataagacatccatctctcagaaaaacctgctacaatgaccagtacgcattcaaatatttattacacgtgttttaatcatggaattaaagtaagaagatcattattatacctgaataaaatgattgttatagacatgaccaacacatagaatgcgatgaacaacactatctctaggtggttggcttctaggagggaaaaacgtcatgttttgttggagagaaagagaaacaaggatgacgttataccttgatgcaatgacataacccatatcgataatattcatccacttatccatcgttacctacacataacaaattgtattagtattataaataaaatatttatccaaggtagtgtgacaacaaaaagttcaccattgataatccatcaacaagtaggcatcgctttaaatgctcaaatctatgtatgccaccaaacaaggctatatactcatcaaaccattgtccaagttctttgagcaaatggttgtgtaccaaagaccatgaatcttcatcataacctaataaggcagcaattacacgatatccacaattaccatcaactttggtcatcaatgaaatcctacatgcatggatgaaattgatccagctttggcatcttccttttcgattttgtttttccaaataatgatgcagacaatttttatgcgaagcaactattttgcacggaatgtaatgcatcacatactcaaagtaagacggatcacgcttcattgatctttgatgtttgttcaattgtttcttttgagcaccttttgttttgaccttttcaggaggagcacacatggaagttaaatcaaggtatgcaagttcccgcaatttactctttacagtcactttgccacacatatcaagatcttcaaaccgcttggaaatggcttccatctcttcgtttatgtggactttgcactcatctataccttggtctgaaaaacttagtctctgccaaaacatatggaatgtgtcaagcagtatgctaccaacaacatatctagctagttcacatgcacacgacagactatgagtagttctcataacgcatccacaactagaactgtcaatgccagcataattgactcacttaaactcaacaaaatttggtttaacgcataccttgacattatgtcaattagtctcttgtacaaggtcactttaaaaacatgttcgaccacatgtgtgcttctctcaaaagatgtctttatttcactgtgttgtaaggtgatcatgttgtacatggaatctcaaacactacatagatcttcaaggctattctattgtagcctctttaaggtccaatgagcattctcaaccctgcacttaaaagggcaaataagtattttcaacaattaatatgttcttcaaaataaaaaaagattaacaattttcatatctgttacaaatatttgtctatggggaatcaaccatgtctatttcacatagtcaacaaacattggcaatggtgagcaaacaatttcaaacttcataagatagacatcatattcttcctcggtaggacagtccacaagactcccccatgcttccatcacatagtctaatgcatttttttgtcccacaagggttttacatttttcctgcacattcttatcaatgtgaaaccaacacaataagttggttgatttagggaacacaattttcaatgcattcatcaatgttgaatccatgtctgtaacaatgacttcagggagtgcataacttttcaaaaaaatacctctaaatcgttaaagagctcacacaacatttttatgcgttcaccctccaaataggcaaatgtaactaaaaatgtcatcccagtaggtgtcacaccaacaatgtcaagcaaagggagtatgtatctgtttgttttatatgtactatttataaggaataccatattacatgagttgcttaattttactacatccagatgtgtccaaaatatatcaagtccaacatcttccttcatccttcagtctatgccaataaatatacatattgcgttcaagtagcttcattagttgttgcatttaagtattactgtatcttatagaaaaatagtatgcatgtcttgcattgtacatttgcttcattattatacaattgttggcattgtgatccttcaaggtgagaagaatattctttagcttcatcatcaactttgtcatatcagcaacaataatattctcatccttagttagtctaccagaatatggatctccagtcaatgacttagccaaagcatgattatgagtctcacatattaacttcaccatccacccttcacctttcagttgatgtgttaaacctcattatcacagctacaaaaccaacatcatactcaatagtacgagctcattgtaatatgtcttcatgataaagaaacacttataaaaaggataatacatgtttaatcttcttaaataattcatttacttactttaacaaatatataatcatatcaatacctcagaagtattgaaggcattagaataatcaattgaacaattactattttcaaacgcagcaggttcttccctgttgtcttcattcatattaatttcttctaacataatattctcatacatccactcatcgttgtctatcttcagaaatcattaaaaaattattcaatgacaaatcatacggataataataatatttacaaaattaacaatttttttaaacctaaagacatttaatacaaaattggcatctatatcttcatacggatgagtgtaaaaaaactaaaacttatcttaacacggtgacgacgacgacaacaaagccaaatcaactaccaaatcacgactagtcaagggagaaagaggttcgccaacaacaacaaatggaggaggtgaccaaggatgaagaagaagcaaaaatgagatgaaaaagaaagtgagaaaagaagaagaagaaacaaaaatattggaattaaaaataaataaatggtgtatgagaaatatgaatggtgtagaaagaaaatgtaaatacttgctccaaagtaaacccactcctccttcaaaattttggtcccttttcacactttctctctctcactcggatcacacacaaacaaacactcccattctctctctctccgacctagcgagaccgagcgatccgaccctaatctagcgatgctccgccgcgcaaccacctccctcctctccgtcacgtctcgccgcagcctctccaccgacgtgccggcgaccccccggcggattcagccttcgcggaggcgtggaagaaagtgagccccaacatcgacccgccgaagacgccgctggcgtacatgaagccccgaccacccactccctcggctctcccttccaagctcacagtcaacttcgtcttgccctactcttctcaattggccgcaaaagaggtcactttttttttttccttttaaaaaaaattctatattttttttttaaatctgtggaagcttttgttttggattttttttttgtgggtttttttgtttctgcatttcaagcgtgctgatctggttgatctggggtttgactcgtttgaggtgaacgaggttggtcttagggttatttgatggaaatgaatatattatatacgctgttgttttttggtttatttatcttttgtttagatcctcgtaattttgaaaatgcgttgatttcccgattgttgagtttctatgtgtgtgtgtgtgtgtgtgtgtggttgtgtgtgtgtgtgtttgtgtctgtatctgtgacaatgttttgaattgaggttgttgtggtctttgatatggtgagaaattgcggcaaatgcatctgaaatgttgattttgccgctgaaatcctactgcggacctttcttaaaccttggtctgtgatgttataaaaatgagggtgttgatgtttttatcatttgaaggggcaattggaaaataatgcagaccattgatgaatggtttacttttgtgattgaaattttaaaaaaaaaaggtgaatttaggattctgttcagtgtttatcagcttgcttgtgagagtgctgcttatttgggatcctatgcttcatttttggttttggtctgttctttgggcacattttcttgctgtttgttatactttgttcagatttcattcacttgtttcgattgattgtgaattgtaattgatctcttttttaatccatttctagtgttttcagggctttatactaagcgaataaaagtaggtatttgattttattttttatgatttttataagcacaataagtggttttggttttttccataatgttgttatgtatgccgtcattgtttgtgtggatcccatttcccttgctgtataatctagaattgaatgtgtgcaaaattcttatgcgggaacagtgttgtttcccgattttaggaattcgtggatcaaataatgctgtagaataatgtgttttccttggaacattcccttgtttatttaataaggagttgctaccaacctagacaacgagatctagcttttttctcatcaccctgtttgatttcaaatgcttttcctttcttcagttatccaaacaaatttataaataaagaagaatgttgcctcagttctaaacaaaatataatcaagcttaacattttctaattaattataagcatacagatgcaaaatttgaatgggtaaccctgtgaattttcacatataatgtgttgatttcaagatctttatatcagtaaatgaatgctgagactatatattattattgcttcttggccttagcagcatctcttcttaggactgaatcttgaaattctatcaagcattgaacatttttttatataaaaccgacatcttgattcaattatgctactcctagctttaatttttcgtttttgaatgtgttttgttttggatacccataaaacttgaaactttgataatgtgctctacaacctgtttcataatatatttccaaaccatctccattttatagcaagaggcctattttaatatttctttttagtgtttttagcattgtttttacctcaaaagaaaaagcatcaaaaagaattttatcaattttttatctcacaaaaaccttcctttttgaatattgcaaagacatgatgcactgtccattttgttgctcttagagtaaattttgtagagtgacagtatcataaaaatattatgccataataacattcgggagcatcattttattgaaggagttgtttgatgatgctgtttcatggcaccatagttttcaagtttgtccttgcaacacaaatttgtattgactgtttgatgcttattcctacaagtttgtccttgcattttttaatacgtgcaaatgtgatcaatagaagcagtcttattccaaaccactctattatttctcgaaaaagatttttgttatcttttgagtgagatgttttgtgatttggatatcaaacagatgcttttaagcgtgtcaactgtgcaagtgaattttgaggtgtctgattaaattgggtgtgactcgtctaattaaattaatggaagcctgccgctttaagacttaagacagccagccatgctgttgaattgagtggttcacattgctgtatgagatagtgttagtagtttgtaatatatgtgatatttaggtgacaacaaaagtgtgcttgcagtggcaatgatagtccaggaagaaaaaaggatcaaataaacagtgaaatcagaattattggtaactgtaattttgcactccaccatgtgcatgtgatttgttggtatctgattataagtgaattaatatgcaagtctcaatttcttatccttgtaactgtcatcataaagcagcaaatttattttgtggagcagaaagctttatatgcacataaaaattattttagtattaaatcatgtgcacatcgattggactgaatatttttatactatagtgccaccatattagaaaagaatgttgatatctatcagaagtggaaacttcaaatttgttgcattgtagttatctccattattgacacatttggttatctggtttatttgcttgtgctgcaacatctccaccctcactgatttcatcctattgaagttatggatattagtaagaaaaactcccttcatctatcttccttgtaaaatgacataatttttgtgcaacaggttgatatggtcattgtaccagcaacaactggacagatgggtgttctcccaggacatgtagcaacaattgcagagttgaaacctggtgtcctatctgtacatgaagggaacgatgtgactaagtactttgtcagcagtggctttgcattcatccatgcaaactctgttgctgatataatagctgttgaggccgtgccagtagaccgaattgatgcgaatctagtccagaagggtcttcaagatttcacccagaagctgaactcagccacaactgatttggagaaagctgaagctcagattggggttgatgtccatagcgctctcaactctgctcttacaggctaaaataagtactgtaatgttgagtctttccttttgtatttgtttatttccctccactgtgtggcattgatttgtctcggtgtaatcaaagttgctaaaagaacattttcaccatgaatttctgtgttgaaagtgacttgataaaataatatttcaacagcttccatctagctcaaggatgttgggcaagaccttgaaattagaaacaaaagtttcatttttgttttggattatattgtatggcaaatactggttaacaaaaaagaccatagcttttattctattcttcaaattcaagagcacgtacgagaatatgctaatctatgaaaggctagtataacattaaatatgtggagaaatattatttagaagagtatagaactagaatcaattattgtattgatttactatttttatttatttaaatcataatttcttagttattttttcatagactactcttataacgttgaaggttttctaaaaatctatggaatccttccaaatattctaaatctataaggtctttttatattttttaaattctaaattataaaatccattacattcctacaatccattagattgtaaattataaaagtctttaaataaaatcttatcttagtcattacattccaaaatatataacttttttttaatatgaaaatagtcttttaaaatctataactttttaatatgaaaatagtcttttaaaatctcaatttaatacaatcttcttagttagggattgattagttgtgctcttactctgttccatccctaaactatcaccaaggcagcaatcacatagcaaggtagtgtgcttaaccttttactcacatagtaacatctttgagacacccttccaatctcatcttagcatctcagtttcttatttgttttctacatttcccactctaaactgttgaatttttcaaatgtgttctatgcatgttttatttatttaattttttctgcacttaattgtctgccggttttgttatgaacagaaagttacattatatagtagctcttacacaggaaaggctttttacaatcttttattcattaagaaattttaattgaataaaaaacctggcttatagagtcagttacccaacaacaataactaatatatagactattatcactattctcaacataattacccaaaaaatatgtaataatctcattgctaattcatcacttgatttaaattaaagggacaaggtgatggagaaatagataagattttaaacattaaagatgtttaaattaagaatacttgcagcaaaaaatattgtgcttgcccagaattcatctctatgtttgtactcatctaaagtcaccaataattacggggattagcaattactttgtgcttctttttctctattgatgaattagtgatagctcacttgtaatgattttatagtgtgttctactttttaaatagggatgtcaaaatgggcttggtccgacaggtcagtccatttagctcactaaaaaaagtgggttggattgacactatcaacctacttatttaaacggggtcggcccaactcgacccactaaaataccgggccaaggtcgggtcagcccaccaagccagttattatttttttttttaaaaagtttgaattgaatgaggagtgagagtgaatgacagatcgtaccaaatctatctcaccctaccacaagcacaatcccacttaactttcctcaaggttcatgactctccatcagtcccactctcctcttcgtccacagttcactctcatcttcgtctactctcctctccgactccctcacttcatcatgaactctcctctctggctccctcacctgatggtcacggcctccttcctaacggccaacatcaaggtgacgacgcaggaggttgacggcttcgttaagttcagccacgaggacatgcccacgtacttgttctattgtttgaccccgatatttacacggatagacagatctccgcttagggaaatgacgaagttatgtttctgcctcaggcggaagaagctaggcccgttacttgagcctagcttgctaaggtcgtcgtgaagcaaagaagaactgaagaggtgcgtttttttcttctttctttcacttttgcctttttttttgttggtggtgtttgtttggatgttttttaagtcaagatgaggatgacgtgtgtttaatttggttggctaaatttatttgtttgttttttctttttgtttactttttttaattgtggctagactggttctagtttttggttaagtttgtcaattgttgaggtttcatttttgtttctgtactagtattgatttggacaagggagtgcatattattatgtgaggtagtttcttgaatatggtaatgtttgaattttaggtgggactatgggagagtgtaagagaatttttttaattttttgtttatttttaggtggactggcccgttgacccaccaacccaccttaaagtaggacgagctagcattgttagtccacttttgcagtgggtcatcccggcccgacccatttttttggtgggctagagccagtccaacccatttttggtgggctggcccactttgccatccatattctcaaatacatgtatggtttgttatcatgtatgtttagagttgtcaatataaatgcagtaaaaaaaaaaaagttctcaatgagtcaaaaccatggtacattccattgggtcatgtaacccactattttcaaagccccttgattaatgagcatctattagcataacaaaaaataaaaatgtgggtcaaggttgtatgtgttaacccacaatctttaaatcattaaaaaaaacccacaattttttttcatacaaatattttccctcacaactttgtcttttaggaagtatcatgagagttttattctacatgcgactaaaatattgtttttgtcttttatatttttagctatttttgttctactcacacattatgctcaatcaactgagttagactcttttagtatattgtaagtttaataataacaaataaaatccattagcaactaatatttaagttcaaaaataacaaataaaatcaattagcaaagaataaaagaaattatgattttcattgaatagtcaaaactgaaaacagtatgaacaacacacaataaccaagagggggggtgaattggttaaccttggtcttttaaaaatctttaaacaatcagagtaatcaagatcgtatcacaaataaaccaagaatgttccaaccaatcaaaacaccacaactgaagaatgtaatctcaaaactttcatttgttgaataagaaatgtagcaccaaagaataatcaattataacagcaagaaaagattagaaagaagtagttaacacagggaattatattggttcaatctcacccttgagaagttacatccagttcttccaaccacaaaggttagtgatggaggtccatggcaagctaaaggtctagaaggagagtttcaaacactttctttggtgagctttaaaggaccaatgacaagagttataactcaagcacttcaagaccacatcaaactaatttggacatgcatgaagaagcacaccaactcaaggataacaaggactggattttgatgtctcaagttcaatttaattccataaatttcagcacttgttagtaacaaaaatagttgcaataaaagacctttagggacatttttgtgaagcatttaggtgcacttgtgtgtaaattgtgtagcaactttgtaagcttgttggttgtaccttaaggattaaaatactacaccttacacgaattaggatcagccaagagtcatttccatttagcttgcattaggctccactagtgtgcactacaagcttcatttgaattgtcatttcatgtgcatttggttgtaatttttgtggcctatataagctggccaaaaactaattgtaactaactttgatgtcattaatgcaaatttgaaaatttgtgtgagagtttctctcaaatttttgtgcaagaacctcttgggtcttatcaatggctcttacatgctattgtggcgattcttcctagaattattggagctcttctccattgtgtcttccatcttcgtctctttccttcttccatattccattgctgcgctttgaagtttttattcaaccttgggctgcacatgaattgtggacaaattgtgttcctggagaaatcttgaagaatgtgtttcattgcaaggtagatttggaaaacttaatggctaatgggctcagtcatacatcatgtggtatcagaacctaatccttgtggaattcttcttcaagttcagtttttagaacttctttaaaggtaaaaattgcaccattcgaaaaatctataaatccacttctattcctagtttcttgttgttttcatgaaaaattatggtggtgttggctttgttgtgtattccgccacctacccttgagtttttcttcaagttttgtgtgaactcatgtcttcatgttcttcatttgttcttgatttttttctaattttctagtcttgattcttgtcaacttttgttagtactgttttttgtgttgtatgaccactggttttgattctaatctcatgcctaaactgaattgagttgttagaagcaaattttacaattgttatacatagttttttagtgattcattgaatttctttaagaattcttgaacttgtacaaaagaaaaacaaaagcttacaaaagtttttgtgaaagaaacaatcaaaggcaaaagaaaaacacattggtatagccaaagacattattgattggtggctggaaaaagtgaaataaaaatagaatttagaagcaaagcaaagttacaaaaactaaaagttcaaatttcctttgaaccacaaaattaagtgaacttgtacgacatgcaaatttggtgaaattttggcttctaacaattgaatttgattggtatatcctccttgtgcagtttggtacaaccaatatatccttgagttgtctcattaaattccaaattgagtttgtgcttttctaaaattttgcttttgttgcttgtctcttcaaaattccaaggttttgtcttagagttttcttgttcttggactcttgagtctagcctagaattgtttcctatttcactatagtaaagaagcttgattggattggaaggttttgcttaagaactatagagaggaacaagagcggaaaaaggcaagagagaacattaaagaaagagcctagataaagagtgcaaacatgagtatgagtggcaaacacttagagagtggtgagaattttcttatatacttgtgtttttgctaaccatttcttttgaaggatgagctcaataggagataaggcttcgtaacctaagacatctaggttgatgaaagccattacaaagcaaatggaagatttataaaccaagatggatgcaagatttgaggagttgcaaagaaggagtagtccaattggaagtgtggatgaagaggctcatggcaataggagggtgagtgagtatacttcctctcatggaggaaattatggagatgaggagaatgagagggaggattggagagaaaataataggagacacaatcctaggagacaaaatagaaatgagaaagattggaggttgaggagagaataaagagaagggaggaatggaagattgagtggagtgaaaataataattccaaagttccttggtgattatgatcccgaagtttactttgagtggaagatgaaagtagaacaaattttctcatgccaacaaattgatgaagaaaagaaagtgattctagcaactctataatttggtggctatgctttggtgtggtggagccaagttcaaatggacatagggaggttgaggagacaaagaataaatggctggaatgacttgaaggtgggcttgagagaaagatttgttctcacttattatgcaagagaagtccacaacaagctccaaagactattccaaggctacaagagtgttggtgacaactataaagagatgaaattgatgatgatgagggataaaactgtggagggtcaagaggcaaccatgactaggtttctttatgtcttgaatagagaaattcaatatgtaatgaagctacattcttatgcaacaataaaggagctagtccacaaagctcaaagagtggatcaacaactaaaaaggagaaaagcttccaagaccaatggggttgccacttccagctggaaattcaagcctaggagggagttttcttaagtgaaaaatgaagaagaaaaggtggaaagctgaaccaaaaaaattgtggaaccaactccaacaagatcaagcaatatcaagtgttttaagtgcttggtaagggtcgtattgcttcccagtgtcctaacaagagaacaatgattttgcttgaggatggagacataaagagtgagtcttcaagtgactcaactagttcttcaagtgaagaagaagaagaagaacatacactagtggaggcagaggagggtgatctcttgatggtaagaagaatgttgagcaatttttgcctaaaaaaagaggagaccaaaaggaaaaatatttttcacacaagatgcttggttgaagacaaagtatgctcacttataattgatggaggcagctgcaccaatgtgactagtacaaggcttgttgagaaattacacttgtcaaccataaaacatccaaagtcatacaagctccaatggcttagtgaaagtggagaagtagtggtaaattctcaagtgctcattcctttttctattaatgcttataatgatcaagttctttgtatattgtacctatggaggttggacatattcttcttggaaggccttggcaatatgatagaaaagtgatacacaatggcatggagaacacttttgagtttgagaacttaaacaagaaaattattttgaggcctttgactcctagacaagtgtgttaggatcaagtgaggatgaaagaaaagagaattcatgagctaacaaaaaatactgcacttgaaaaaaatactgcaaaaaaaagtaaagaaagtgacctaccaaagagaaaaactagtgagaagcaagataaacatcctattgcttattttagtgagaaattaaaggattcatgtttgaactattccacttatgataaataattgtatgcacttgttagagttttgcaacgtagaaacattatcttttatctaagaaatttgtgatccatagtgatcatgagtctcttaaatatttgaaaagtcatggcaaactcaacaagagaaatgctaagtggtacatcaaggcaaatttggggacttgggaggagtgtctacctcaaattgagtttgcttacaataaagtagttcacgagactacttccttatctctttttaaaattgtttatgactttaatcctttaactcctcttgatttattgtcattacctaacacttcttctatgattaatcatgatgctttgtctaaagcttcttacgttaggaaattgcatgaacaagtgaaggcacatgtggagaggaaaatggaacaatatgcaaagcaagccaataagcacaagaagcaagtgatctttaatgaaggagatttggtttggcttcatttgaggaaggatgggtttcctcatgaaaggaaatccaatcttcaacctaaaggagatggacctttcaagattttagaaaggatcaacaacaatgcttacaaacttgagttactgataagtgtcatattttagttaattccaggattataatgttggcacttatcttttgatttcattaaattttcttataaatttgccctaatcctatttgttttgtagttggtatatatataaatgttgttgttacattttggaagattcctccattcaatttaggtgtttcgataggtatcaagtgtatccgggacatccaaagcaagcaagacaaacaaaaagggcaaaaaggacatttctagaagctaaattcgcccaaactcgcctggactaataacctttcttcactattaagcattaactcgcccaggcgaacaaaacatgaagaaataactcgcctaggcgaatggagtccttcagcattaagttttaactagcccaggcgagtgaaacaaggctaaaaaactcgtctgggcatgtggatctgagcagcttccccatgcctataacaagccatccaaatgaagaagttttcatgaattttagaggggaaaacgtaggaacagccatggaggcttagagagaggtgagagaataaagaaaaggagtggaaactctgcagaaacgggctagggatcgccaccttcgtcatgtattttgttgatctcttgctttacaccatgatcggctagtttatccaaaggattggatgtaatcttcgtacccttatgtatctcttttgatattttgatatatgtataaatcttttctactcattctggtgatttcattttgttcttaatgtttgattctacttgatcactagtttcatgaaattagattctaagcttgacaggaaagtgcccttaggatttgaactgaatgattttactatttacattacgttgttaggaatataacataacgttttgattgcaaatagtacgagattatgattataatgctgggttatttacttcatatgcgagggatcgatattcagtaaatatctttaggattctcgaatgcgagggatcgatttggggtgaattaatgtgtgtatcagtaatgctaaaaaatgattcatataggttaatattaattggctactgagggtatgaatgatgaaactaaatcctacgttctcataaattaattaaattcattttactagtttccataatttttcgttatttttgtaaacccatcaaattctgattatacttgttgtacatataactattgaattgttaacttttatttgggaaaactgagtagctcaagttcctgtggagacaatcttttataaattttgtaacctgggaccattggtatgcttgccaaaagtctaacagttgcctagtgagtatgtatgagtaatactttcaatgtttgtgatctttctttgtatgatgtaggtataagtgaggaagcaaacttgaggtcaagttcctaatatatatgaaatttctaatatatatgaacctaatattttttattcaaacttatgatttttaattaaaccatgattttatctaacatgtttttttatctaataatgcatattttataacaatacatttaaaataaaaatcatggtttaattaaaaatcatagttttgaataaaaaatattaggttcatatatattagaaattttaattttatagaatcataggttcatatgctttagaaatttatatatgtaaaaaatatatattattagataaaattaattgttataaaaattattatgtaaatttatgtgtattaaatatgcattaaaatttgtaatgttatatatagcgacagtaattagcttttaacatgaatggcatagtagcttagttcgttagagcgttgtgcttgtacttggacggtcataggtttgacacttgtttgggacattatttcaaaaatcatttaattttttttaactcttatcattttttcttccagagataagctttcataattatgattgtataattctggaaacatatttctagaatacatatacataagtttccatatttacacaatcataattttgaaattttgttttcgaaatgttaatcttacctatataaccaaaagggaccactacatgatagttgtaacaagtttagacatggcaactatttcttggggattcaaggtgtatacttttaaatttattgttttctcaaaacccttgagcaaattatctccatcccatggaccacgtattatgtaataatctctaagattttgaggttacctttgtagtgcgctttcaaactaatgagagttgcttcacaaagtctcgaatgtgactatgcctttagttagtccaaggaagcaagacataagtggggctttggtgctaggcgacaatagtcgggttagggaccttttggcgtgataagtcttttgtcaaataatagtgtatcatgttaggccaagatatcatatatatatatatgtgtgtgtgtgtgtgtgtgtgtgtgtgtgtgtgtgtgtgtgtgtgtgtgttaggatgatgaccaaactcaaagcccttattaggcttgtattgtaatacccgaaaattttcttcttaatttatttttctacacatgtaaaattgcactattaaagactagacaatgaaaattttgcattgtgtaatttaattatatacctaggtaatttaatttattctcaatatgatattaattgtatgatttagtgttagttatattttttagtgtaaatagtttatttagttagttggcaaaattttggaaactacctgaataaaaatttcatctataggaaaattgcaccacgcattgagcggcaatgtaatttaactctgtgagattgttttctgtgtgaggttcaatttggagacacgtattccttgggagattagtgcaaaaacctatgcaattaagataatatttattagttttggtaaaaagcaaaatacccattattgacaaatcctatccctttcatttttttggtagttttgcaaaaagaaaaactacccattagtggaatggagtgacacattcaaaatggcagccaagggggtcattcaagtgtcagaaagccttgtcaatttaatcctacaccatagcttattggtctttgtgagaaaaaaatctattggagccttgatcccttcattttgtacaaattccatcttgagggagtagagttcaactgttcttctttttcttcttccaagcatgttcctagtgttcctgagcctttgagacatcaagcttagctaaatgagctctattcttcatcctatacttgattcctcgtcattctcttattctagcttctctaataatttaaaactatcattttgttttactcatgaagggaagctttcgaaaactgaacattcttcattttccttcaagatttcgtgatttcatcaagaggtaaggggggtcactccaactcttgaatcctatgcttgttgataaacttcattgaacatgatgcttaaaaattttcaagcttgttttcatgtcctgaatttgtgtgttgagctattttccttgattttttatgccaaaaacgagttctttgcatgttaaaacataaagttagtcttaaatttcacctaaatcaaaatttcctagcaaaagttacaaataaaacaagtttaaggacctttagtaaaatgaaaaatctgtcatgaatttgggctgagcttacaatagtatggactattttattaaagttttgacttcaaaaataaaattgttacatttgaaaatatagggcagcatataagatttgcgaaaattcaactcccgaagcatcgagagcactaaaaataagttaggagcaagactttgaaaaattgaacgacaaagtgattttagacagtaaatagcttaacttttgaattcgtgcttccatataaattatcttagaaatatttgttttctggaactgctgatttagtttttattatattgctaagataagtgcaagaccttatgactaatgcatgttctgaaattgtgatgattatctgctgttaaaattactaaaatgcatgcctgtattttgttgttatgattattaaatgataattccgacagagtgtgaactccaacaattatatatgtgacgtgcaaatttattttctattatatacatgtgtctgcatatattcatttttatttgtacgtgttgtggtgtgtgtccaggggtgtttgaccctcggcaaattgtttgttatgtttgcttagatggctataagtacaatcgttatgttgtccaattgtttgtgtgtcttaaggggccacgattgattcccataaagtagtacgcaggcctaaacctcgtctctcttcttgtttgtttgtttgcatgcattcgttgatgtacattgtacgaggattgcacacgcgatgtggtggccagattcaagaggattggacaaagagtaaagagccagtggttttatttctttctatgagaaggtgaggttgtgttgaggaagtggatgatggacaaagatacataggggtgtagtgggagtagaggttcaaagaacctagggggaattagcgagtggtgactactcgacatttgggtgtaggtaactcacaagcctcactttgctactcttgaaaggctctgagactatgttgtttgagttggaagatgagaggtcagtgtacgatgtatctgtatgtagtgatcacttccaactgtcatccacatgatttttgtaagaccattaagacctgagaggattgatgatagtcattgggccctattgtgaattaaatttattcatctactggattatctcactatcactaggtctagatattgccttttaagtaagtgtggttagtcaattcatgtcttcttgactgaaactcatcaaaaaccacttatccactgcatgggaccgtgtatcaagatcccaggcatatgtgcaggtggaggctttctctaaggaggattggtttgggtcacctattgaccttaaatctatcgcatgctctgtgtacttttggtggtaagttgatctcttaaaagaataagaagtagatgtggtgtcaagatatccaatacaaaggcacaaggttatagctaaacaacttatgaattgatataggtgagacagattttggatgagataggatttgctaatacttgtcctatgaaattgtggtgtgacaatcaagttgtcatacatatcacatcaaatttggtctttcatgaaagaacaaagcatattgaggtaaaaaaattgtaacttcaactgagagaaggtgcaatggaaccttatatctatgttttatatatgccaagataggcgacaacctataagatgtgtttacaaaatctttaaatgtggtgcgtatagtgttagagttgcttagttagaataaaagggttttagtatgtatatatatgcatgggcttggcccaactacatgtgtatacttaacctaataatataaatgtgaggcaagctacacattatagaacatccaattatagtttactcatatgccattgtctctttatatgactctttctctcaacatgtgacatggatgcaaagttcaagtttaaaaatgttcatccaagtttaaatattctttggtatgttatctaacaatgaataactaaatattaacttttatatgtatatatccatcaagataaagtagaacgataaaatatcaattaatatattatttacatgaaactttgtagacttgatctagtttaaaaatcttgtagtaagaagacaaaaaaaaatgaaaagaaaaagataatcttggatgagtgattggccatgaaaccattgcccatatatagttttaccattatacatgcgaagaacaacacaaactggatagttcttctgctctcccacatttatcaaagacttcacgtcatgcgcaggtaaggggaagatgcagtcttatttttatatatataaagatgttgtttctagattcgaaccatgaccaacaagtcacaacagaggactccctctcaaaagcttgatacacatgattttgttaatatacatatttctcttttttcatttggagtgcattagcaatttactccaaaattattggacaaaaatattcattcaaattttttactttaattaatttgggacaaggatactgtagtaatttaatttcatatatatatatatatatacatatatatatatatatatatatttctctcgcctgttccatctttctcgtcaagtagctttctgttaggctgttcatctaatttttcaattttctttctctcttttcccctttcaatctcacgtaacatttaacataagctctttcttttctaaacttcgctggagctctttctgaagactaaatcattcgcctagcattctcagttagtatcacttgagcgtagtgatatgaggactattccttttgtttttattattgaattttgcagaatactactcaagcgagatacaatgatttaatcccctttgttttgggagccaagatcaattgtttcttaaagattaaatatactgacagtttactgacattagaaaagaaaaatattcaagaccataggactagaagtagtagtcattgagctatttggcgaatcttttcaatcatggaaggtatgtcttgagtttcttaaaatagtggtcgtggagccatgacagaaaacttcaatcttaaaatctgagggaacaaacagtgtctcattttggtagttattaagtagaagatttggattataaatgagagagtttagtaaatatgcttcttgtttttaagttttatttccctgaaatcttactctgatagttgtaataagcataaaattttatttgaacaatatttatacaagttcatgactaaaagcttcgcgttaacactaaattccatttaagcattatgttgctaccaattattactacttatctaattaattgtcatttggagattaaagcttatcgagttttcaataggttactgttaacacatcttttatttatccatactgttaataattgaatctgactcaatgaaaataagttagagaagacatatattgacatgaactcattcttttccaagaattgaattcacacaatagacagcaaaggaagcaagaatcggggttacaagagaaaggtgtttaggagttttcagagcctctcagaatctgtggtgaatgattcaattgtttccatcttcttgttttattaattgatgtgtggaaatggtggaccttgttattctaattcatcccaacagggtcaactttggttgaatttttgtgtcagaaactgttcaaaagcctcaatcaaacaattgtgttgtaaccgtggccaaaatccaatcagagaatgaataaggagaaaaaaatggaagaagaatgacgaactatatatagaaaagaagacgaacaatcattgagaatgctaggtaaatgatttagtctgccaaagaaggcaccagcgaagtatagaagaaaaaaacccgcaattaagagcttatgtgaacgtgagattttgagaggggaaaggagatggaaagacaaagtagaagaattggaagatgaacaacctcagaatgctagagggatgagagaagagagatattttctttatactttcaagtgaacattaaattactatagcttccttgtcccaaattaaataaagtaaacaattagggagatgatttggaatgatgtgatttcggttatttgagagcatagaaatgatatatcattttctttggtgtggatgttgatcctctcttggttggtgttagggttaaaattttatcttagaagtggtttctgaagagatctaatggtaagttttgtttgttttctgactggtgtattatggaatatgtggtaaaactataattattaaaaaaaatatcaaaaatgtatatagaacttcatcataataaaaatgttacatatatatatatatatgaacgcacaactcaagtgaagatatccttctaaccagaggtggattcaggaaattaatgaagggtaaacactcaatattatgaaccacacaattcacagcagttcatggccttctaaattctagtaccctatgaaatttcacaagatacctttgaggctttgacgtcaccgcagaaagatactatcaaatgagcaaacaaagccaaactagagtgacaaagtagaatgagcaaaatttgatccaagcacagaacaaagcaaaatttgacaaagtagaatataacatagcattatcattcaatgaaagtatacccaattcagaaaaatttaaactctaattaaccattatcaaaagcagaaacctaatcctgggaacataactcgaaatcgaaatatgcttttgataattacaaagcattatcatttatcaacaaaaccagaggcggagccactggtctggagaactctcgaagccttggaccacgcttctgacttctgaggacgccgacgccatagcccgtagctgtgacggactgacggatgtcagcccgcaatgacgccgatcgccggagatggagaacgagagaggaaggggcgaagggcacgatattaccttactattgttgatgcttcttgcaaatgaaagaacgagagaggaagggtctcgtctgtgtggttgtgcctgtgcggtgcccccttctcacaacaagtaggttaattttgtgaaaaatttaaagtaaggatattttgataatttcacttcaaattttaagggtagacacttacctcctcttctacgtggatccacctatgccagagggaattgcactcacccacaaacatcaaaccctacccaaaaaattgatttgactaacactttgcttaatttttagggacacattttcttcctattgctcgctcattcctttagacaggatgtcctacacgaataccatgctaccccaatggtaggccactctggcatcaaaggcacacttgatcgagttgctgcttcattttattgggccgacatgtataaagatgtcaagttcttcatcaccaattgcttacctgccaatagaacaaaacgttaacaaccaaaaagaacgacctcctccaacctcttcttcctgttccaacccaggtttgggaagatataagtatggatttcatcaccaacttaccttcctcccatggccactctgttatctgggtcgtggttgactacttgtcaaaatatgttcatttcatagctctttatggttgtttttcttggttgttaacaaatacaaaaactagtatatcatatatctaacatcaaccaaatagattattacattataaaaaataaaaaactattatcatgttgtttaaaaaaaagctatcatcataaatatttttaaaataatgacacaagtctttaaaacatttactatatttaaaaataaaaaaaaaataccggtctaactgttaagactttaatatatatcacttacatacatttctatatgggcctgtttggataagcttctctagaaatacttctaaaaaaagaaaatatgaagaaaaaaattagatgagattttccataagtaaaaataagctctccattagttaatttttagaagttcaccaatataacttctctaaaagatgagatgacatctacaaattagctaatagaagacttattttaacttatggagaagctcatttcatttttttcttcttatttttctcttctagaagtacttctgggctaaaatttaattattttcatttcgttcacgtctcttcaaactttcaacttccactcagatacccatggaagagtagaagagatgtagattttgtgttatggtgagaatgaccaagaggatatggtgtccccatgcgcttgcaagggatcaatgaaggaaaagatgctcacgcacaattaatgtaggagtttaacattgctttgaacttttcttttatgtttctttcaaattaactataaagaacgagtttcttaattataattagtctttttcggtattatcaaatataaagtctgaaatacataatctttgatacaaattgaacataaatgtatttaatatactatttaatattttttaaattgataaattgtatttatgtacagatactttcttaaaaatatactaaatacaatcataaaaaatatataacttcaaataaattttaattttacaaaaaatatatttaaacattattaattacaaataaaaaataataaaaatgaacactcaaatttaaataattatatattatgtgttcaaatttaatttatatatacattttaaaagttttacttttaatataggtattattcattatcgttactcggagaaagtacaaaatcataatacattttaaaaacttaatattttttcaataaaatgtgttcaattaaaaatatgatcaatcaaatttcttaaatttaatgtaattatatttaatagattattaaatatttaaaaacctgataattttatttatgtggatattttttaaaatatgttaaatacaattttaaaaatatgtatattttcgtgttgatagcctatgagtgctaaatgtgaaaaaaaaaatccatttcattatcataggtattttattaaagataaggaaagataaaagtaattaaaaaaaatgagggaaatttgtttatatatttctacaaacaagaattgtacaattagattttgtacgaacaagaaatcattgtagcgagtggagacactggattgtggtgacatgtacatttacatttcaaaatttctaacttgagaagatcttattaagtcaaaataatttcctattagccgatttatacatttttacatatttgatggtacaaactaaggtgttttgcaataaaacataaatctaaaaatatttgtatcatatcatcatatcatatttgaatgaggtaagtcttgaggatctactacctagtggactaatcttttgggtagggaacttttgtatttaagtcctaataaatagtgttttcgttgaaagtcaggccatgaaaagagctacttataggttaaattaaggtacaaagcgaataagttggatgaagctatccaagggtaaatggctatccctgagtcagtgttgatagagtaaaagttgtcatgaacatcaactcttaaaaaggggaggtaatgttaggaatctaacattaaatataataaactatttgatgtggtacttaaggcttgaggctctcgcacgtaattgtttagtcttttggggtggattccccacttgaattatatttaagatctaacaatttatataagtaaccccttttaattatttaacttgaagtgtattataaatacaaaatttatataacagagggtgtgacacagaaccctttctatttcatttgaccaaattaatgacattcattctaattgtattagattttgatttactaagttaaattaggtagactaatataagagacaaaattttaagaaaaaatccaaaacctttagtgatgtgaactatacacaatatttgataaaatatccgcataaatacattaataatatttattcatatttgttaacattttttaaatattgtcaaaagttcttaacaatatttttactaagtgttaaagaaaaaaaatgttgctaaagattaatgtattgtagtgatgtcatatatatgtattaatataattaaaatatattacttaagtaaataatttatattatatatatactcttctataaaaaaataattatatgtttttctaattttatgactaactaacagagaggagtggaccctaattcaacatattttatactaatttgattcaaaatctatttaagaatattgaactattatatacttttatataaaaatttatgaaattgttgacaaattctttttaagattaggtttcaattatgaaccaatatttcatgttgtttggtgcttcaaattagtacaatatatttgtacctacttaatagcttatttttgtaatgttagatgattatttttgtaatgttgtttatttatggcttaggtttagacgaatcaatgttatgtttgcttattttaatattatgttggatatttttaaggcttaaatatgtttttgattcctaataagtatttgatttttgtgtttattccataataaatttttgttttgtgttgagtccttagttaaaacaacaattttgttttttattcttgaagctttttttagtctctaataacttatagaatttttctttgatgcctcataatttttttatttgtaattagttgggactaaaataaaattcactaatttgttagagagcaaatccaaaattcattaatttatcatggactaaaataaaatatcaaaaaaatctttatttgaaactcaatgcaaataaaatttttattagagaacaaatgtaaaaattaagtatttattaatgataaaaatatatttaaatttatttttaatatcatgtttatattatttaagaataaatttttaatttacttataataattttttgattaatatatttttattaatttattaactttatatataaatcaagtataaatggagataaagatgaaatttgttacctacactcgagaatgaaaacgaaacatttagttctttaaaaagtcaatatctattcaatccaatgctactcattatcatccctttaacaatcacaaataggggtggaaatgggccaggctgtttatcaggagcctttgacctgacctatttaaagtctggcttggcctgccttgtttattataaaggttaggctaaggttttttgaaaagtctatttaaataaaaagatcaggctcaagctttaaaaaaagcgtgttaggcctatcaggctggcctatttaatatatatatatatatatatattaaaacttaaaaataatatatttattttttaaaaaatatttttcttattatgaaagtggatgatcaatcactttaaaaaaatcaccttgaaaatctcataaatgattaagagaaacatatctataacttataggatcatatttgataatttataagaaaaacatatctattatgttattttttatttttaattatttatttttatttaatcagcctttgtatacaggcttccaggccaggccaggcctttatgaaggccaggctcatgccttaataacttatttttaacagataacaggctagatttagacttaatgatagtgatgcgaatcaggctcaggcctatcacagcctagcctggcctgacctatttccaccccacaaggcagcaatgacaaagcaagggagtgcttaacctttaattcacatctttgagacaccgtacgtaccctcccaatctcatcttcgcatcacagtttctcatttgttttctacatttcagacatgccatcccactctaaactgttacacgtttcaaatgtgtcctagcatgttttatttatgttacggaagtaagagttaggcctaattgcaagcccaattatagtagaagtatcatttgtccaattctcagaatgtggatttgacttagtccaaaggggcagttggcaacgtgcggattgaggtcagaaatttcgaaagcagttcgtatgataactgcaaggtaacacgcttataaatacttgatagtggcagcagaaaggtacacacacattctaactccctctctttcaattacacagagcacacaccccacgtcaattggtgtatctctgtgatcttctgcatcaagatatcattctccattgatatccttgaagttgtagagttagagtgatcaaacagcaatcatacagtgctttagtgctgtacatttgtgttctgggaaacctctggaacattggagccgtctgtggggaacgataaagttcgaatctcacgattcagcaatggtgaatacgagaaacagccaatcgataccacgttcagagatgccgaacagagaaatgcttataccggagaatcggaacgtagtgctgcgagaacaggtgcatatcacagaagctgtttctgacgcagcttcttctccagcctagactgatcaacggagggacgttccgtcgagaagaatggtgcaggaggaggagctaggagggcagttcatgcactcaattcaattttgagccgaattgaaagtatagagagaagacagactcttcagagacaggaggatatccgaagcattacacgtcagatggaggaacgaaacgaggaatggagacgtgccgagatgcaacgaatggcacagttggaacagaaaatacaaagaatagtggaacgggtacatgtctcgaatcatgaagaggaagcgccaccttcaatacaagatttgagggtacatttgaatcagttaaggaatgtcaagcaggagggagatcaggcgcgaaaggaagaccaatctcgggaccaaacccgagtatctgggggcaacaggaacgagatcccgcctagccaaatagatgaccacgagggcccgcgcacccgagcagagactgatgtaaacaccacacgccgagtagatgacatggagcccccgcaacaccatcaaaaattgattgaatatgataagacgggcgagccgacttcgcgtgagaatgagggacccgtttatcgtcggaaatatagtcggggtcaacagaacaacaacccgtttgcggacgaaattgtgaatgctcggtacctggatgactttgacgggtcatttttgtcaaaatatgatgggacacaggatccccaagtgcacattgatgagttcgacttacagatgtgtgtccggggcattgatgagcccattatatcaaggattttcgtcactacattgacgggcctggcgcagacatggtttcataccttgccaccaaggtcgattaaaaatttcgaagacttcggacaaaaatatttgttgaattttgcaactagcaagaagcagccaaagtccaagttcactctgggtaaagtcagacagttacccggcgagacgctgcaaagctacctagatagattcaaagaggctgcattgcaggtgcacgggctggaggaaaaagtacatgtatacctgatatctgccggattgaatggttcatcaagattcgccaagtccatttataaagatccagtgaagtctctgatggaattccgtgcccacgcaaagaaatatttagaactggaacaaatggaggtagctaataatccaggacgcgagaaggagcgaagagatagaaggagcccacccccaaaaaatagggggcattcagaaaatcgtcctcgaagtaacgatgtgaagttcaggctgggaaggtacgagaataagtacgacaaatacaccccgctaaacgtctcccgatcacagatttggaagaaggtagcgcttacggagatgaagaaagtagaacggcctcgtcctatctttaacaaggcgggacttgataaatcgcggttttgtgaatttcacgatggacccgaccacaccaccgaccagtgttgggatctacgggatgctatcgagaagtttatccgagaaggaagactaagacaatatgtgatcaaaacacagggaagaaagaataagcgcaagggagacgaatctcaacccgacaggaaaaacgagagaaagaaagcacgagaagaagatgacacgttcccgaaaccctaattcgaatgtaacgcgatcttcggggctacgggaggcggaggcggaggcgataccgccagtcagagaaagaagtatttgaaggaggtactatcaatccgagcacagccacaatttaaagaacgagccggcgaaaaggaacccccactcttgtatttcacgaaacgggatatagaaggggtagtacccggacatgaggatggattggttatcacctgaacggtcggcaactgtcgggtaaaaaagatgttcgtagacaatggaagttctgccgatataattttatggcacgcatttaagaagatgaacctggacatagaagatctggagccatgtaaaactatgctaatcgaatttaatggtggaaatacgaacgtaaagggatcaatacacttacgattaaccttgggaacgagagaggctttcaaaacagaaagagtgaaatttgtggtggcagatttcccttcccaatataatatgattttgggaagacctactattcacagatgggacatcctaatgtccacgaagcatcagaagcttaaatttgtaggcggaaatggacaggtggtgacaatatgtggcgaccagaaagactctcggcagtgttactacgatacagtccgagaaagcaaaaatagatccccaccaacacttcgggatccgaaaaggatccagaaattcgggaagtcaaagaagataacaaccgggcacgctcagtaaacttagtggagctcgacatgtgggaagcaccagacgaatggaggtcggagccggtagaacaggtggagcagatccaaataggagaacaagccggccacactaccaatattgggcgagcaatgaagcccacgcagaaggaaatgctggttcaatgtttaaggaaaaaccgtgatgtcttcgcatggaaggcatcggagatagtcggaatagatcccgaattctgttgccacaagttatctatatatccgggatcgaaaccggtggaacaaaagaagcgtaagttgggacccgagagaacgcaggcgttgcggactcatattgaagaattgctacaggccgggttcatacgggaagtacagtataccacatggctctcaaacgtggtgatggtccgcaaaccaaacgggaaatggagagtatgtacggactacacagatttgaacaagacctgtcctaaggatgcatatcctatgccgaacatagaccagctggaagacaattcatccgggtacaaaatcctgtcctttatggatgctttttccggatacaatcaaattgcaatgcacctggaggatcaggagaaaacagcattcatcggtgacaaagccaattactgttacaatgtaatgccatttgggttaaaaaatgtgggggccacatatcaaaggatgatgaacagggtgttcgaaccacagctcggacgtaacatcgaagtatatatcgacgacatgatagtcaaaactacggaggtcaacaagcatgtcaaagaccttgaagagacatttggccggttacgaaaatttaatatacgattaaatcccctaaagtgcactttcggagtcggagccggcaaattcttgggctttatgctgacgcacagagggatagaagccaatccagataaatgtcgcgctgtgttggacatgtactttccgactagcaagaaggtgtggaaaataaggaacgctcacacttaaccaagaggggggtgaattggttaaccatgggaaatttaaaatttctttgttcaatatcagagttaaaatgccctttggatctttatcacaaaaccaaatgaatatccttatccaagatcaatccaagacttgttatgcttcaaatttaaacacacaaaaacagagtttaacaagaaccaataaagactacagaaattaaatcaagatgcaagatttatactggttcacctcaaacactatgaggctacatccagtttcttctactcaacattagagtagaattccactattgcaaatatgtttcttacaaatttttacaagcttctcttcctcaaccctagaagaagttcagagatctaaaaccctcttagatccttagaagccacacccacactgagaaacctactcagttgtgcatggagaaaccctatctcccttgcaagaaaacccacttacaatataatcaccaaactacaaaattactgcagaaaataaaacacccacaaagaattaggaaagaattcacctgatgatccaagatagaaaatgcatgagaatgaaaaacctcaggttgaatgtaaactaatgatgcagaaagctttcctaagcctttgtgacagaacaagcttgcttcactaacaatcttagtgatccattaatgaatcaatggaagcaagactcaagagcccagatgaagcctttgtaaccccttagaagcctttagaaaaatgctcagaattcgtaaaaatcacttcagtaataatctctttctattagtttcgctcaagaggcaaagggtcttatttatagttgaaatcgtaacggatttaatcgatcaaatgcgctccccacgctcctataatcgattaaaatgattaatgcaggatcaggatttcaactaacgggtgaaataatcgattaacccgatgcgtaatcgattaaaccagtctgggcaaaaatcctgattgtgaagagtaatcgattacattcaattgtaatcgattaatccagacctatgctaaaattgagtttatgaaggataatcgattacatccattggtaatcgattaaggcagtcctatgataaaatcgtgtttgtgaagaataatcgattacatccatttgtaatcgattaaggcagagtgactgagttgtccaaataagtatataatcgattacaacactatggtaatcgattaaaacagtcacaaggccaaattacaaatatgctgagttgcgtgtaatcgattaatccgataaggtaatcgattaaaatgttcatattgattttccagaaagtttatgaacaaaataatcgattatgataagccagtaatcgattatcacgactatatgttgtttacttagctatttcttaagttttaaactaattacttagcttctctatgatgcaatgcttaaatgatacatgaatgctatgtaatcaaggcttggatcatcatgatgctttcaatcctttttacattaaatcacaaactactttttcaaagcttgaaccatgttgaaagccaaaacttccaagtcttgaaccttggttgaatcttcacttgatcttcatccagcttcctctcaaatcaacagaaggaaatacagcagctgaccgggagggtagccgcgctgatgcattttatgccaaagtcgacagaaaaagctctcccattttttaaaatgttgaagaaacaagttgtaatatagtggaactcagaatgcgaagccgcattcgtcgacatgaagaaatccttggcaagcccaccgattttatcaaggccagaggcaggagagattttggtgatgtacttatcggtgggcgaggatgccgttagtgtagtactggtacgagaagttgagaaagttcagaaaccagtatacttcgtaagtcgggccttgcgcgactccgagttacggtatcagaagttagaaaaagtgttatttgcattgtttgtagccgccaagaaattacgcccatatttccaaagtcacacaattataattcggacagatcagcctatccgacaggtgcttcacaagccagatctggccgggagaatgacgaattgggcagttcagttgtccgaatttgacctaaaattcgaggcacgacacgcaatcaaatcccaggtattggcggatttcgtgcgagaactcactcccaacgccccaggaacagaaattggtggacattgtacgtggatgggtcatccaacaagaaaggaagtggcgccggaattataatttagaatccagatggagtagcgatagagttttcactacagctgaatttcccgacgtcaaataatcaagccgagtacgaggcattgattgtcgggttggtgtaagcaagggagcagggagctgagaaggtaaaagtgtacacggattcccaattggtcgcaggccaaattgaaggccgctatcaggtgaagggacccctgttagcaaaatacttaggacgagtaaaagaaattattactaaatttgacgaggtcacggtcaaccatattcccagagaagacaatgccagggccgacatcctgtcaaaattagcaagtatgaagagtcctggaaataatcgaaccgtggtccaacaacaaatatcgcagccttcgtgcataatgatgatcaccacggatcaggactggaggcgtccaatagttgattacttggagaaaggcacattaccagatgacgggctcgaagcccaaaaattaataaaaactgcaactatgttcgcagtggtcgatggcaagttgtataggaaaagcttgcacaatcctttgttggtgtgtgtgaatccggatagagtcaaatatgtcttgtccgaaatacatgaaggtattaacggacaacacatgggggcgagagccttggcaagaaaagcgcttcgggttggatattattggccgacgatgggagcagatgctgccgagcacgtgaagaaatgcgaaaattgtcagaagaatgcatcccgaattttagcgccacctgagacgctgcaatccatcttggcaccttggccatttttcaaatggggcatggatctgttgggaccgttcaaaccagcagagggacaaatgaggtggttaatagttgctgtggattacttcaccaaatggatagaggtggcaccgttggccacgatcacatatgtccgagttcagcgattttttgaaagaaatataatctccaggtttgggattcccggggaggtcgtcactgaaaatggaacgcatttcacagacagagggttccaagaaatgatggccggcttccacatccgacacagatttgcatcggtggaacacccccaatccaacggacaggctgaggccgcaaacaagataatcttagaagctttacgaaaaagaatgcaagatgccggatctagttgggtggagcagctgtactacgcgctttggggtattcgcaccacggtccaagcgtcaacaggggagacttcgtttcggatgacctatggaagcgaagccatgataccggtcgaagtcggtcatcaatcgtggcggcgggcacaggtactacgagaaggagaagatgcaaataacgaagccctgatgatggactcggcgctgctcgacgagatccgagtgaccgcccatgcccgggacctttaggcgaaacaacaaatggcacacgcttacaacaagagggtgattccatgacagttcgagttagctgagctagtcctgtgacgagccgacgtcgggaataagaactctcgagatgggaaatttgcggcaaattgggaaggcccgtatcggataactcataagcttgatagggggcgtatatgctggaaacactagaagagaaaccggtcaaacggacgtggaacgcagataagcttaaaaaatattacagctgaaacttggaagcgtacggcaaaagaatgtggatttctcttttatggagagtatgagcttaggagttgctttatccgagtccatacggttctccttcattgaaaacataactcatcgggagaagcaagtttttctgttatcgagggtacgaatctgaggatgtatatccgggtacgtatggtcctctttcatggaaaaggcaccatccagtcaagtttagactcggaaagatttatttccgagattcaattgtttttcttatattgcatcagtacaagttataccgttgtaaattctaagtgtggaccgaaaatgatagttctactcggttatcaatgaacattgtaatacaatgattaaaagttcaataaagtgttattcactatcatagtgttttatgtaaagtatggatcccgaaaaattttgattcatatggttcttctaaaacgtgatacgattagatttcaaaactttgaatgatacgctaaccggttctgatcaaactctgatataaagtaaatcgtttccattaatagcagtgttataaaaacatatgttccaggcccgtgggcctaacattaacagaaaaataaatacaagtaaaaccggcattccagccctttagttcttttcgatgggaggttgggagtcggcgacagatggttgcgggtcggaaacgggtggctgatcgccagtaggagagtcagtagccggggcagcagagggagtctcgtcgacatgcgcagactcatcagccgccgccacagaagaaggttcggctccggtaggaggaatccactggccatcatcaacataagccatataatgcatcccagaagtagatagtaccactcccgggttcaagtgttgaatttgctcgatggcattggtgaaaccttcttccgcagcggcggcaagagtagtcttcatagccgcaagcttatcctcataagcccgagcttgttcttcataactaatttttaaagaggccacctgctgctcggcaacctccaaagaaccctgagctcgacccaagtcactccgcaaagaagcagcttgggatgcgagtaactcttcctttagctgccggttctccgcagccagttgggcccgaatcttctcgtgcccggccttggtggaaagaagctcttcataaaccttcttcttctcttccaccgctacgccatacctattacgaataaagttagattcatgactaagaatatgcgtaaaagctaaagagtttacagcgatgataaatacctctcccgcactatagcaaatgctctcaccaaagacgcagaccgaaaggcatattcctcgacgcagacgagctcggccagttcttcacccacgggagcaccggggttaagcataggagaaggaggtttcatcaatttgactaagtcctcatttactcccttcttccaaacgttacccgaaaccgcccgagagtcggaacgcccagaatcagtagtgggaccggtacgccgctgggaggtcgccacggtcaggtccacggttgcaaccccgaacgccggagtggacgaagccgggggacggggagtcacagtttgaccaggggccgccggtgcgctcggcaccaccttggcacttttgtcctcaccatccaacatcgtcctgtaggaaggtggagggcgtttgcgcgacttgttcagagcaggaggctgctcggaggctaaccccttacctctgtcctcgacgaccttggggttggaagcagcgtcggatttggttttggtggggggagctggttgtggtctcatgtcggctacaatgaaaaagaaacaacgttagaaacggtacacggtatatttaagtataactaaagaatcagtatagtcttcaaggcaaaccagttcgatggccaacgccaatatagtttgctatgttaggctgaccatgggtatctacatattcggaaatcacaaaaacagacgaagcatcggagtcacacaattcctcctcaatgaatcgataatttgatcgatcctgcttatgatgatcctcagaccaatagagaggaaatgcccactccacgtcagaggattcgaggccggacaagaagaatggttgtcgaccaggctcagtgaccaccttaaagtacttgcccttaaaacccctaaaagagtctgtgaacggtttaaataattttcgtttgctctggcttcgaaaagaaatccaccttttccggttaggaggttccctacctgtcctaggagtatgagggaagtaataatagaaaagagagggacagtgcagggaattcctaagtcttcacaaaacaattcaaaggtatgaataaagccccaactatttggatgaagttgagaagggcctacccggagatgagttaaaactttgatctcgaaggaagaaaagggaaaagtgatgcctatttgggtaatcacgtcctggtaaaagaagaaaaatgggggtcattcccttctcgtcgtgtacaaacaggctcacccgagaggggagcccggatgacaaacccttcttgttttcccaccggggtggatactatgctaggaaggtcaagggtggacagagtttgaaggacttcgtgagtcacccaagtaaatttggatgccaaagccgaagtcactttcgattgggactcagcagagatggattcgtctacagtttccaaagcaacatccattatacctaagtaaacaaagaagaaaaacaaaagttagtaaacgtacctggaggcaatgcatcaaatatagaggaagccgaggccgggacctcgccaccgccaacgcgggtgcgcggcttcgacgggggctttttagtggatgacactatggggttgtgccgacacgaccccaaaatcgaatcggcaacgtcatcagagccgagttgagtataatacatggcgtcggaaacacaatctatgcaagcatcatacttgacctccaatacctcatccgacgacgaggaggaggtctcatccgaagaaaaagataggtcggtcaggggattgaaacgacgacacgggagtggaagttcccttgggctgcaaatgtgtctgggccctgaaatttgggggcccagaatgggaaaagttctagaacgacccagggtcgaagtaggtttgggtgtagaaccgacggagtttgatggaggaggaagaagagcaccggcgggtttagacccacctgggtgatacggtggtgagaaggggttttggccgctaggcgcggcggaaacccgtgatttttgggaagaggaagagccaccggtataaccacgaaggaggcctttttcaagttcctcctccggaagaggaaggccaaaaaccagccacccagtcctaggggggacaatcctctgtaattccgcctcttcctcaggagtcatcttcatgctttccaaagtaaataaaacaatccaacaaaaatggaggagaagaagaaaacaaaacccagaagagataaaagaagataatgtggccctaactaaagtactaattatgaaactatgaaagtagaaatttgcaagaggaaggaaggaaagcacctgttggaagaggaaatcgagaactggaagaaaatgaacgaagaaagtgtctgaagaaaaatgaacgaaacaggagagaaaatgtggagagaaagtagtagaatatgggtgaagtgacaaatgaaagaaagggaaggagatgaaataattagaattgcgggattttaggaggaaatttaaaatttgaaggtaacctacagtaaccgccgaaagaaatgaaacggcctgcaaaaccgtcgccaaggaaactaaacgacataagggcataatggaaaaggcactccaaagtttgggggcatggaggtaaaagcaccaaaagtgcaatgattatctgaaggatgaaacgataggacttttaatgcattaattgacaataaaggcacgaatagtaaccgacggcagtcagaaagtcgatcgtcagctggggcattttacttccccagagaagttctctacacgctgcatgattcggacagacttactcggatatgaataatctctactcggggtactgtctactcggaaggatgttggtgggtaggtatcatcggatataatgttgttccgtgagttctcctggttggattgatgaaaacgctttgtggccggctagttgtggtcggagagtcatatccagaaagtggtggtcgacaatgtggtacaaggaccttacctcgacagctgtattaatttacccggaccagcacgtacggataaagtctacccgggagaacatagaaatataagacaatgcaccccggttaccaagaatgcttgatgaccgggctggggggcaactgttacggaagtaagagttgggcctaattgcaagcccaattatagttgaagtatcatttgtccaattctcagaacgtggatttgacttagtccaaaggggcagttggcaacgtgcggattgaggccggaaatttcgaaagtagttcgtatgataactgcaaggtaacacgcttataaatacttgatagtggcagcagaaaggtacacacacattctaactccctctctttcaattacacagagcacacaccccacgtcaattggtgtatctctgtgatcttctgcatcaagatatcattctccattgatatccttgaagttgtagagttagagtgatcaaacagcaatcatacagtgctttagtgctgtacatttgtgttctgggaaacctctggaacattggagccgtctgtggggaacgataaagttcgaatctcacgattcagcaatggtgaatacgagaaacagccaatcgataccacgttcagagatgccgaacagagaaatgcttataccggagaatcggaacgtagtgctgcgagaacaggtgcatatcacagaagctgtttctgacgcagcttcttctccagcctagactgatcaacggagggacgttccgtcgagaagaatggtgcaggaggaggagctaggagggcagttcatgcactcaattcaattttgagccgaattgaaagtatagagagaagacagactcttcagagacaggaggatatccgaagcattacacgtcagatggaggaacgaaacgaggaatggagacgtgccgagatgcaacgaatggcacagttggaacagaaaatacaaagaatagtggaacgggtacatgtctcgaatcatgaagaggaagcgccaccttcaatacaagatttgagggtacatttgaatcagttaaggaatgtcaagcaggagggagatcaggcgcgaaaggaagaccaatctcgggaccaaacccgagtatctgggggcaacaggaacgagatcccgcctagccaaatagatgaccacgagggcccgcgcacccgagcagagactgatgtaaacaccacacgccgagtagatgacatggagcccccgcaacaccatcaaaaattgattgaatatgataagacgggcgagccgacttcgcgtgagaatgagggacccgtttatcgtcggaaatatagtcggggtcaacagaacaacaacccgtttgcggacgaaattgtgaatgctcggtacctggatgactttgacgggtcatttttgtcaaaatatgatgggacacaggatccccaagtgcacattgatgagttcgacttacagatgtgtgtccggggcattgatgagcccattatatcaaggattttcgtcactacattgacgggcctggcgcagacatggtttcataccttgccaccaaggtcgattaaaaatttcgaagacttcggacaaaaatatttgttgaattttgcaactagcaagaagcagccaaagtccaagttcactctgggtaaagtcagacagttacccggcgagacgctgcaaagctacctagatagattcaaagaggctgcattgcaggtgcacgggctggaggaaaaagtacatgtatacctgatatctgccggattgaatggttcatcaagattcgccaagtccatttataaagatccagtgaagtctctgatggaattccgtgcccacgcaaagaaatatttagaactggaacaaatggaggtagctaataatccaggacgcgagaaggagcgaagagatagaaggagcccacccccaaaaaatagggggcattcagaaaatcgtcctcgaagtaacgatgtgaagttcaggctgggaaggtacgagaataagtacgacaaatacaccccgctaaacgtctcccgatcacagatttggaagaaggtagcgcttacggagatgaagaaagtagaacggcctcgtcctatctttaacaaggcgggacttgataaatcgcggttttgtgaatttcacgatggacccgaccacaccaccgaccagtgttgggatctacgggatgctatcgagaagtttatccgagaaggaagactaagacaatatgtgatcaaaacacagggaagaaagaataagcgcaagggagacgaatctcaacccgacaggaaaaacgagagaaagaaagcacgagaagaagatgacacgttcccgaaaccctaattcgaatgtaacgcgatcttcggggctacgggaggcggaggcggaggcgataccgccagtcagagaaagaagtatttgaaggaggtactatcaatccgagcacagccacaatttaaagaacgagccggcgaaaaggaacccccactcttgtatttcacgaaacgggatatagaaggggtagtacccggacatgaggatggattggttatcacctgaacggtcggcaactgtcgggtaaaaaagatgttcgtagacaatggaagttctgccgatataattttatggcacgcatttaagaagatgaacctggacatagaagatctggagccatgtaaaactatgctaatcgaatttaatggtggaaatacgaacgtaaagggatcaatacacttacgattaaccttgggaacgagagaggctttcaaaacagaaagagtgaaatttgtggtggcagatttcccttcccaatataatatgattttgggaagacctactattcacagatgggacatcctaatgtccacgaagcatcagaagcttaaatttgtaggcggaaatggacaggtggtgacaatatgtggcgaccagaaagactctcggcagtgttactacgatacagtccgagaaagcaaaaatagatccccaccaacacttcgggatccgaaaaggatccagaaattcgggaagtcaaagaagataacaaccgggcacgctcagtaaacttagtggagctcgacatgtgggaagcaccagacgaatggaggtcggagccggtagaacaggtggagcagatccaaataggagaacaagccggccacactaccaatattgggcgagcaatgaagcccacgcagaaggaaatgctggttcaatgtttaaggaaaaccgtgatgtcttcgcatggaaggcatcggagatagtcggaatagatcccgaattctgttgccacaagttatctatatatccgggatcgaaaccggtggaacaaaagaagcgtaagttgggacccgagagaacgcaggcgttgcggactcatattgaagaattgctacaggccgggttcatacgggaagtacagtataccacatggctctcaaacgtggtgatggtccgcaaaccaaacgggaaatggagagtatgtacggactacacagatttgaacaagacctgtcctaaggatgcatatcctatgccgaacatagaccagctggaagacaattcatccgggtacaaaatcctgtcctttatggatgctttttccggatacaatcaaattgcaatgcacctggaggatcaggagaaaacagcattcatcggtgacaaagccaattactgttacaatgtaatgccatttgggttaaaaaatgtgggggccacatatcaaaggatgatgaacagggtgttcgaaccacagctcggacgtaacatcgaagtatatatcgacgacatgatagtcaaaactacggaggtcaacaagcatgtcaaagaccttgaagagacatttggccggttacgaaaatttaatatacgattaaatcccctaaagtgcactttcggagtcggagccggcaaattcttgggctttatgctgacgcacagagggatagaagccaatccagataaatgtcgcgctgtgttggacatgtactttccgactagcaagaaggtgtggaaaataaggaacgctcacacttaaccaagaggggggtgaattggttaaccatgggaaatttaaaatttctttgttcaatatcagagttaaaatgccctttggatctttatcacaaaaccaaatgaatatccttatccaagatcaatccaagacttgttatgcttcaaatttaaacacacaaaaacagagtttaacaagaaccaataaagactacagaaattaaatcaagatgcaagatttatactggttcacctcaaacactatgaggctacatccagtttcttctactcaacattagagtagaattccactattgcaaatatgtttcttacaaatttttacaagcttctcttcctcaaccctagaagaagttcagagatctaaaaccctcttagatccttagaagccacacccacactgagaaacctactcagttgtgcatggagaaaccctatctcccttgcaagaaaacccacttacaatataatcaccaaactacaaaattactgcagaaaataaaacacccacaaagaattaggaaagaattcacctgatgatccaagatagaaaatgcatgagaatgaaaaacctcaggttgaatgtaaactaatgatgcagaaagctttcctaagcctttgtgacagaacaagcttgcttcactaacaatcttagtgatccattaatgaatcaatggaagcaagactcaagagcccagatgaagcctttgtaaccccttagaagcctttagaaaaatgctcagaattcgtaaaaatcacttcagtaataatctctttctattagtttcgctcaagaggcaaagggtcttatttatagttgaaatcgtaacggatttaatcgatcaaatgcgctccccacgctcctataatcgattaaaatgattaatgcaggatcaggatttcaactaacgggtgaaataatcgattaacccgatgcgtaatcgattaaaccagtctgggcaaaaatcctgattgtgaagagtaatcgattacattcaattgtaatcgattaatccagacctatgctaaaattgagtttatgaaggataatcgattacatccattggtaatcgattaaggcagtcctatgataaaatcgtgtttgtgaagaataatcgattacatccatttgtaatcgattaaggcagagtgactgagttgtccaaataagtatataatcgattacaacactatggtaatcgattaaaacagtcacaaggccaaattacaaatatgctgagttgcgtgtaatcgattaatccgataaggtaatcgattaaaatgttcatattgattttccagaaagtttatgaacaaaataatcgattatgataagccagtaatcgattatcacgactatatgttgtttacttagctatttcttaagttttaaactaattacttagcttctctatgatgcaatgcttaaatgatacatgaatgctatgtaatcaaggcttggatcatcatgatgctttcaatcctttttacattaaatcacaaactactttttcaaagcttgaaccatgttgaaagccaaaacttccaagtcttgaaccttggttgaatcttcacttgatcttcatccagcttcctctcaaatcaacagaaggaaatacagcagctgaccgggagggtagccgcgctgatgcattttatgccaaagtcgacagaaaaagctctcccattttttaaaatgttgaagaaacaagttgtaatatagtggaactcagaatgcgaagccgcattcgtcgacatgaagaaatccttggcaagcccaccgattttatcaaggccagaggcaggagagattttggtgatgtacttatcggtgggcgaggatgccgttagtgtagtactggtacgagaagttgagaaagttcagaaaccagtatacttcgtaagtcgggccttgcgcgactccgagttacggtatcagaagttagaaaaagtgttatttgcattgtttgtagccgccaagaaattacgcccatatttccaaagtcacacaattataattcggacagatcagcctatccgacaggtgcttcacaagccagatctggccgggagaatgacgaattgggcagttcagttgtccgaatttgacctaaaattcgaggcacgacacgcaatcaaatcccaggtattggcggatttcgtgcgagaactcactcccaacgccccaggaacagaaattggtggacattgtacgtggatgggtcatccaacaagaaaggaagtggcgccggaattataatttagaatccagatggagtagcgatagagttttcactacagctgaatttcccgacgtcaaataatcaagccgagtacgaggcattgattgtcgggttggtgtaagcaagggagcagggagctgagaaggtaaaagtgtacacggattcccaattggtcgcaggccaaattgaaggccgctatcaggtgaagggacccctgttagcaaaatacttaggacgagtaaaagaaattattactaaatttgacgaggtcacggtcaaccatattcccagagaagacaatgccagggccgacatcctgtcaaaattagcaagtatgaagagtcctggaaataatcgaaccgtggtccaacaacaaatatcgcagccttcgtgcataatgatgatcaccacggatcaggactggaggcgtccaatagttgattacttggagaaaggcacattaccagatgacgggctcgaagcccaaaaattaataaaaactgcaactatgttcgcagtggtcgatggcaagttgtataggaaaagcttgcacaatcctttgttggtgtgtgtgaatccggatagagtcaaatatgtcttgtccgaaatacatgaaggtattaacggacaacacatgggggcgagagccttggcaagaaaagcgcttcgggttggatattattggccgacgatgggagcagatgctgccgagcacgtgaagaaatgcgaaaattgtcagaagaatgcatcccgaattttagcgccacctgagacgctgcaatccatcttggcaccttggccatttttcaaatggggcatggatctgttgggaccgttcaaaccagcagagggacaaatgaggtggttaatagttgctgtggattacttcaccaaatggatagaggtggcaccgttggccacgatcacatatgtccgagttcagcgattttttgaaagaaatataatctccaggtttgggattcccggggaggtcgtcactgaaaatggaacgcatttcacagacagagggttccaagaaatgatggccggcttccacatccgacacagatttgcatcggtggaacacccccaatccaacggacaggctgaggccgcaaacaagataatcttagaagctttacgaaaaagaatgcaagatgccggatctagttgggtggagcagctgtactacgcgctttggggtattcgcaccacggtccaagcgtcaacaggggagacttcgtttcggatgacctatggaagcgaagccatgataccggtcgaagtcggtcatcaatcgtggcggcgggcacaggtactacgagaaggagaagatgcaaataacgaagccctgatgatggactcggcgctgctcgacgagatccgagtgaccgcccatgcccgggacctttaggcgaaacaacaaatggcacacgcttacaacaagagggtgattccatgacagttcgagttagctgagctagtcctgtgacgagccgacgtcgggaataagaactctcgagatgggaaatttgcggcaaattgggaaggcccgtatcggataactcataagcttgatagggggcgtatatgctggaaacactagaagagaaaccggtcaaacggacgtggaacgcagataagcttaaaaaatattacagctgaaacttggaagcgtacggcaaaagaatgtggatttctcttttatggagagtatgagcttaggagttgctttatccgagtccatacggttctccttcattgaaaacataactcatcgggagaagcaagtttttctgttatcgagggtacgaatctgaggatgtatatccgggtacgtatggtcctctttcatggaaaaggcaccatccagtcaagtttagactcgaaaagatttatttccgagattcaattgtttttcttatattgcatcagtacaagttataccgttgtaaattctaagtgtggaccgaaaatgatagttctactcggttatcaatgaacattgtaatacaatgattaaaagttcaataaagtgttattcactatcatagtgttttatgtaaagtatggatcccgaaaaattttgattcatatggttcttctaaaacgtgatacgattagatttcaaaactttgaatgatacgctaaccggttctgatcaaactctgatataaagtaaatcgtttccattaatagcagtgttataaaaacatatgttccaggcccgtgggcctaacattaacagaaaaataaatacaagtaaaaccggcattccagccctttagttcttttcgatgggaggttgggagtcggcgacagatggttgcgggtcggaaacgggtggctgatcgccagtaggagagtcagtagccggggcagcagagggagtctcgtcgacatgcgcagactcatcagccgccgccacagaagaaggttcggctccggtaggaggaatccactggccatcatcaacataagccatataatgcatcccagaagtagatagtaccactcccgggttcaagtgttgaatttgctcgatggcattggtgaaaccttcttccgcagcggcggcaagagtagtcttcatagccgcaagcttatcctcataagcccgagcttgttcttcataactaatttttaaagaggccacctgctgctcggcaacctccaaagaaccctgagctcgacccaagtcactccgcaaagaagcagcttgggatgcgagtaactcttcctttagctgccggttctccgcagccagttgggcccgaatcttctcgtgcccggccttggtggaaagaagctcttcataaaccttcttcttctcttccaccgctacgccatacctattacgaataaagttagattcatgactaagaatatgcgtaaaagctaaagagtttacagcgatgataaatacctctcccgcactatagcaaatgctctcaccaaagacgcagaccgaaaggcatattcctcgacgcagacgagctcggccagttcttcacccacgggagcaccggggttaagcataggagaaggaggtttcatcaatttgactaagtcctcatttactcccttcttccaaacgttacccgaaaccgcccgagagtcggaacgcccagaatcagtagtgggaccggtacgccgctgggaggtcgccacggtcaggtccacggttgcaaccccgaacgccggagtggacgaagccgggggacggggagtcacagtttgaccaggggccgccggtgcgctcggcaccaccttggcacttttgtcctcaccatccaacatcgtcctgtaggaaggtggagggcgtttgcgcgacttgttcagagcaggaggctgctcggaggctaaccccttacctctgtcctcgacgaccttggggttggaagcagcgtcggatttggttttggtggggggagctggttgtggtctcatgtcggctacaatgaaaaagaaacaacgttagaaacggtacacggtatatttaagtataactaaagaatcagtatagtcttcaaggcaaaccagttcgatggccaacgccaatatagtttgctatgttaggctgaccatgggtatctacatattcggaaatcacaaaaacagacgaagcatcggagtcacacaattcctcctcaatgaatcgataatttgatcgatcctgcttatgatgatcctcagaccaatagagaggaaatgcccactccacgtcagaggattcgaggccggacaagaagaatggttgtcgaccaggctcagtgaccactttaaagtacttgcccttaaaacccctaaaagagtctgtgaacggtttaaataattttcgtttgctctggcttcgaaaagaaatccaccttttccggttaggaggttccctacctgtcctaggagtatgagggaagtaataatagaaaaagagagggacagtgcagggaattcctaagtcttcacaaaacaattcaaaggtatgaataaagccccaactatttggatgaagttgagaagggcctacccggagatgagttaaaactttgatctcgaaggaagaaaagggaaaagtgatgcctatttgggtaatcacgtcctggtaaaagaagaaaaatgggggtcattcccttctcgtcgtgtacaaacaggctcacccgagaggggagcccggatgacaaacccttcttgttttcccaccggggtggatactatgctaggaaggtcaagggtggacagagtttgaaggacttcgtgagtcacccaagtaaatttggatgccaaagccgaagtcactttcgattgggactcagcagagatggattcgtctacagtttccaaagcaacatccattatacctaagtaaacaaagaagaaaaacaaaagttagtaaacgtacctggaggcaatgcatcaaatatagaggaagccgaggccgggacctcgccaccgccaacgcgggtgcgcggcttcgacgggggctttttagtggatgacactatggggttgtgccgacacgaccccaaaatcgaatcggcaacgtcatcagagccgagttgagtataatacatggcgtcggaaacacaatctatgcaagcatcatacttgacctccaatacctcatccgacgacgaggaggaggtctcatccgaagaaaaagataggtcggtcaggggattgaaacgacgacacgggagtggaagttcccttgggctgcaaatgtgtctgggccctgaaatttgggggcccagaatgggaaaagttctagaacgacccagggtcgaagtaggtttgggtgtagaaccgacggagtttgatggaggaggaagaagagcaccggcgggtttagacccacctgggtgatacggtggtgagaaggggttttggccgctaggcgcggcggaaacccgtgatttttgggaagaggaagagccaccggtataaccacgaaggaggcctttttcaagttcctcctccggaagaggaaggccaaaaaccagccacccagtcctaggggggacaatcctctgtaattccgcctcttcctcaggagtcatcttcatgctttccaaagtaaataaaacaatccaacaaaaatggaggagaagaagaaaacaaaacccagaagagataaaagaagataatgtggccctaactaaagtactaattatgaaactatgaaagtagaaatttgcaagaggaaggaaggaaagtacctgttggaagaggaaatcgagaactggaagaaaatgaacgaagaaagtgtctgaagaaaaatgaacgaaacaggagagaaaatgtggagagaaagtagtagaatatgggtgaagtgacaaatgaaagaaagggaaggagatgaaataattagaattgcgggattttaggaggaaatttaaaatttgaaggtaacctacagtaaccgccgaaagaaatgaaacggcctgcaaaaccgtcgccaaggaaactaaacgacataagggcataatggaaaaggcactccaaagtttgggggcatggaggtaaaagcaccaaaagtgcaatgattatctgaaggatgaaacgataggacttttaatgcattaattgacaataaaggcacgaatagtaaccgacggcagtcagaaagtcgatcgtcagctggggcattttacttccccagagaagttctctacacgctgcatgattcggacagacttactcggatatgaataatctctactcggggtactgtctactcggaaggatgttggtgggtaggtatcatcggatataatgttgttccgtgagttctcctggttggattgatgaaaacgctttgtggccggctagttgtggtcggagagtcatatccagaaagtggtggtcgacaatgtggtacaaggaccttacctcgacagctgtattaatttacccggaccagcacgtacggataaagtctacccgggagaacatagaaatataagacaatgcaccccggttaccaagaatgcttgatgaccgggctggggggcaactgttacggaagtaagagttgggcctaattgcaagcccaattatagttgaagtatcatttgtccaattctcagaacgtggatttgacttagtccaaaggggcagttggcaacgtgcggattgaggccggaaatttcgaaagtagttcgtatgataactgcaaggtaacatgcttataaatacttgatagtggcagcagaaaggtacacacattctaactccctctctttcaattatacggagcacacaccccacgtcaattggtgtatctctgtgatcttctgcatcaaaatatcattctccattgatgtccttgaagctgtaaagttagagtgatcaaacagcaatcatacagtgctttcgtgctgatgggaaacctccgaaacaatttatttacttttttatctggatttaattttctgccgatgcttctcttttttttactgaaaccgatgttgtgttataaatgttacattgtataacagttcttatatagagaataatttttttagaattattcttgattttaaacatgcgaaaggtgaggatctctttgcacaaaagagagtcccacaaactaacacccacacaaatcttaattgctccagaactcacgatgaaactgaaaatactatttattttatctttcgcgttctgttcatgttttctttatataagaccgcctttaaaaggttattaaaaccattaaaatcaatcagacgcaacgttctaaaaggaatcatatttttaaaagcctcattcaaatcacatatttaaaataattgattagacgttaaatcaaataaaaagcttccgttaattaataaagaaaatgttccaacgtttcaactcactgatgctgctaccctttaatgttttcatgattgaggaacctaacgtgacatcttggtagaatgcacccgcttcaatgaagtcataaccacgaacaatgttggagattgtaacgttgagggagaagtcgtaatagagagtgttgttggtgtagtcaaattatgttaggatagcatcggacacgaccgtgacatcgtatggtttgtctttgtgaagaggatgatgaacgtcatgttctccaagaaccaccgttttaggtcaagattttgagtcatggctgagtactcagagcagtctaagacatcattaagacaagtaagactatatattattttcttttgttggacgcatcaaagagtttaagatttaaatttgaattatcagtaatttttagaattagatctacggatctgtagttttaattttagaattagatttaaacttgttagtttttaagattatggttagtttttgaattttataacttttttatagatagattaacagataaagttagattagttagttttcggatttttgaatcttgtaaattagtctatatatacataacaagtcaataaataaacaatgaaattcttcaattattaattcttctttcttgcttgatttttacatgatatgtatacgtgtccaacatgtgttttttatagaagagacgattgttttgttggggataatattaataggatattgtttattaacgctcttaggacattaattaaaaaataaaaaaaaatatttattatagagataataatagaacgtaaaaaatgtcacaaataatataattttatataccctaataattttttttccttaatttcttaaccaatctcactgattaactttttcatatagtatgcccagaaaatttgtatttatacatttattaaacatgtcccttgctttccactgcttgctatattattgtaataatgttttactgaattaatgaactcgaagaattattgaatgtgacccgaggcacaacagttatatttgatgtagctttaatccttaattagatgtgcgtggcttgtagcaggcacaacaataatttaatgtactactatcagaagttgtattagaaaatgactgccaacggtggtagaatagagccaacaatggaaagataattatatttgttttttactttttcaacaattaaatatttagaaaaattttattgcatgtaataatttaataattaattatataaaactatatagaattttgcaatattaaaatagatagataataatatgaaaattaacaatttaccttacactatagacttcatcaaatattaaagaatgacataacttaatcgatgtggcgatggcttaaaattacactgcgactttaatcagggcagtttagtttattaaaatttaaaaaattattttaaaataaaggcttaaatgttttcttccctataattatattaatttttcgtttgggtttttgaatatatatatatatatatatattgattaagaattctgtaacgtttaaccaataatgtcttgactactttaatgcttattaatcttttataataataaaaaatgcttacgtgagttcgtatgacagaatcatgcaaatatttttgtaatacggtgtcatatgttaacattttggtaatccaactaaaacgcaagattaacatattagaatttagattaaattataattttattctttctaatttctcaaatctataattttaattctttggttttgaattataacatttaatcttccgatttttattaatggagttattaaggtaattataaataattcaaaatcattaattattaaaaattaaataaattattaactctaatcctccacaatattaggctcctccttttctccgcaaacatatctttcatcttcaatgtggcaagcgactccgtcgacaacaacaccatattaggattactaatcttttattaaatttttaatgattactatttttatttaatttaataactctagtaatcacaatgtaaatattaattaataattgatcagaatgaccaaaatcatcaatttataaaactagaaagattagttataattaaaaatcaaagaccaaaatcatgaatttgaaaaattatgaaaccaaaattataatttaacctaaaacttaaaaaaaaaaaaaaaaaaaaaaaagagtaacagggaacacattcatttgggacctatcccattcgggttgcttgctacgtactcagccaaatttgcttttaggtgattttctcaaacacctatcattctaagtacatgtgaagaaagatgaacttggacatgggtttggagactaccataaaatatgaaacactttttatggcttacatgtggaggtagtcttcctactaatgtttatcgttggaggagacatttgtcttcctcttcgctttgttgccggtgcaatggagtggaggacacatgaattcacaggtcgccctaaagctaaattcatttggcatcatctccatattctttcctttcttaatcacttcagctgagatgatgctctatggttgtgccacaatgtcataaggagtaattttcaactcggggactcacgctggatcgtttggaaaacccagaaccattgatgaaaaaattcaatggaattcatggtttactacagttttaatagacctctattacatagacatcttcgatgaaaaaattcattggagttcacttttctgagtgttaatgaagtcacgtgccttaatgttcctcaagctcattaccttgttaattatgatcatgataggtttttttcttatcccgtatgaagtagcaggaatattttggcccatgacatttattattgtgggctcttgcctgtttgtcatccaccagtccatggaatgcttgggatttggaaagctgaaaatgagtattcccttatctgaaatacaagaaaaaaatacgatgcattaattaaagttagttaattatatgtaattacataaaattgaattaaaaagaaacttttaaagcttatttttcattgaaatttgatattaaagataaaaaagagtcattataactaacatctcaattaaaaagtattttaaagataataacattaaataatataaagttagtaaaaaaatatatatttgatatcaagaaaaatatatatttttccttacatttgagaccatatggagtattaatctggtcttaaatataagaaaaaaattaaccacatttaattatatcaatctcaaataaacattattttttctccaatttatcttttattgaaatttggtattagacataaaaaagagtcattggaattaagatatcacttaaataaagtataatttagagataatatcattaaataagacaaagttagttaaaaaaaattatatttgagacaaaaaaagagtatttgtttctcttcttatttatatttgagatcagcgagtgtatctaaaattattttacaaatattttataggctgttggaagatggtggacttattatgacacgatgatgcattagtatgtatttgcgggtttagtgtttacatgcgagtatgcacgcgagagaattgaatatatcggctcaaataaatcatgttaaatgggccatacacccagcagattgcaacgggcaatccaagcccaaataatccccacatgccatgggattaacttcctacacctgccttttttctagtacacccagcatgtacagtataataccgattttgcccttctcataatccataaattttatacggattgtcaatccatatgaacctttatggattcacacacccatagccttacagattcataatccgtaaggtttttacggattcgtaatccatatgagttaactcacggattcacaatccataagaaccatacggattcgcaatccgtaagagtctaacaatgtatattttatgtattattagataaaaatatatattattagataaaatgatggtttaattataaaatatatgcattattagaacaataaatttaaaataaaaatcatggtttgattaaaaatcataggattgaataaaaaatattaggttcatatattagaaattttaattttagaaaaaaaggttcatatactttagaaatttatatatgtaaaaaaatattattagataaaaattaattgttataaaaattattatgtaaatttatgtgtaataaatatgtattaaaatttgtaatgttacatatacaaatattaattagcttttaacatgattggtcaagtaatttagttggttagagcattgtatttgtaatcggaaggtcacaagttcaacacttgcttgggccattattttgaaaatcattttaaaaattttaactcacaaattaactcatacggattatgaatcaataagagtcttacggattgttaacttatggattatgagaagggcaaaattggtattacactgtgtatgctgggtgtattagaaaaagcgctagtgtaggaagttaatcccacatgccattctttaaagaaagaagaaaataaagacttactatccacacctcctaaatgactattcaaaccaccatctttttcaaaaatatgttatttcataaagaaaataatactctaatgtttgacaccttcacaacacaacataaacaagtttttattcagtatatgatgaagatacatgacgaaaacttgtttttattatctcaaccatctacacaacaaaaaattatttatgatgtgttacaaaattgaaatacacaacaaaaataaaaataagtttttgttgtatttctaataaagatatttgttatgtattttgatcaaatataaaatagaaacttgtttcattatgtaggaaattattttctatgttattaactatttaaatttgtttttaaaggagtttaattaaaatagttaatgattaaacatttaatttaataaatataaataaggcaaaaatatagaagaagaaaaaaaattcgcatacgtgcacaaaaccaggttcaacaagaaaacacaaaacataaaatcatttaggcttcttcctcctttgatgtgtgcatcttgctaaagtgcttgcttcaatattcattccatatcctcataggtgccagtgtcaaatgctacttttcgcaaatccaccatggcttaaaaatcatgagctctcaaacaatgcctacataaaaaaatattaataagtacagagtagtcatctatataagaagatataaagatatctaagtgacaatcatgctaatcatttacttgtgtttggatagctagttgcagcagcatgttgataaggcatacttgaagagcctttagctagaggcatgatgtgtatatatatatatatatcatttacttgtgtttggatagctagttgcagcagcatgttgataaggcatacttgaagagcctttagctagaggcatgatgtgtatatatatatatatatatatatatatagcatgttttgtttctgtaattagacctttctcttctcatccactccctctcatcccgatggcttgccgcccttgagagtataactttagatttatgcattaaataaatttattttgttatgttctgatagctatgtgatttccgtattctattcttgcttctcatttatgttgtttgttgtatagtcgctttccccgtcctcgcttccaccccatatggtatcagagcctgatggggaagtaggaatatatggctagatctgagttgtcttttacttttctgagttatcatccagatgtctgtatattctttccctttgtttgtattatgttttcttaaatgaattaaagtacttttatcttttgactggttagcatgataaacggagaaagtttagatctggtattgctggggtagtaagtcccgctgagtttagggcagtaaatcctacaagatattgtaatatgagatctgaacttttgtctgaaaattcattggctatagttgaaagataaacggttaaaaaaaaaaaagaagtctggaatatagctcagaatgtaattttcaacttggatctatcttaatatttttacagaaccaaaggatggcaatgatatcaagggatttattttatgatatttttgtcatgtctctctttcgctccttttcctctcgtttttcgttcaaatcttcccaaccctcatcttcttctttcaatccttcccaagcagaaaatgctttaatcaaatcaaaccgtaatattttcaaagaggaagtttcttttgaagatattaatcaagatctgaatgactggaagatccccaggattccagaaaatgaactttataaacctgaaggaaattatttccgtaaatctgatttcattattcggactgttgagactaacatacgtcttaaatctgattttgatgaaataaaacttctttcaaacggatctttaaaactgcataaacaaaaatatggttttctgcatattggatgtgttcaagttgcagccaaacccttagggatagaaggattaaacacctcaattcttttgtgccttcgagactcccgtcacaatcagtttaccgatttcattctaggcaccgtagaaaccagccttagtaatggaccaatctacttcaactgttatcctgataggaccatcagccttcaggatgccaacatcttagatgttctaaccttagatgtccagctttatggtcttgatatgaaggctggatccatcccagttaatatcatctatcgagttcaatacaaggtaatgaactcgtgtatgtctagagtcctcaaacctaggaagactggagaaactactttgtttctcacagacacaaccaaagctaaggttgtgattccgaaagtcatcaagtgggaagacattaatttccctcagacttgggccatggataaggtagcccctgccaagcctcaaaccacacctagctttgagtctatcaagcaatttgactccggaagggtagagatcaccttcaataggtcaaactccttcaatacggctagatcatcctttactagagattctagatctaagatgtttggatctgtcttttctaggaaatcctgttctactgctcctagtaccagtagtagaatcaagcttcagggagtagaaacctcttcgtccattcctcagcctgtttatcaacaggaaaccaacgaggaagagtctaggtctattccttctccaaccttttcatctatgcaagattatgaagttatccatgattaataaggcctgcatagattataaagcccttaagctagatttcgactctgaggaaatgactcctcaaagagagtggtttcttagccattatagggatgattgtaaagatcaggttagggaagaatattattcctttcttaatcttgttgagtctcaaatcttcttctttgattggtttaagtcttatgcagcttaccataagatagattatcctttcttagagccaaacaccattagtgttatcactaagtatgaccttaaggatggccagatagttagatctgagttccctccgtcgaccaagtttatacttcctaatgtcaggaatgaaaagcatggtcatatttatgcctcacccttcaaatctagggatgaatctgaacccataactcccaaggatatcaagaatcttatggagcaatctaattataccaacagatacctccagtccataggagaaaaattaggagaaaaacctagccatagtctagaagccagtacctctgctcctaaaaccattcaaacccctatcttcaaaccctttagaatgactgataagcttaggaaagagtttgccaaactccgagcttttaatcaaccacctgaagaacctaaggacaagcttgaaggattgacgtctattatcattcaagatactcctcagacatcccaagaagctcattctaggccaacccttactagagccagatctaggcatgaagcccaaaaggacaaagataaggaaatcaatgtccttagccaggcgtctgaaaatggaaactctgactcagatagatctgtccgaatcaaccctattaggaatcagcccaactggaagcaaccttctaagctgtattaccatagggcaaccgctcctgatcttcttttggaggaacggaaaaactccaaatccttcaatgccaaccatgtctatgaatggaatatagatggcaaaacagagtaccagatcctcaatctcctccagcagatgaccatggttgctacagcctatgatacatcccttaactgcacggaagcaattattgtaaatattttagtttccggatttactggacaactaaaaggctggtgggataactacctttctgaggaacacaagattaccatccagaatgctgtcaaaatggaaaatgatggcacaatcctgacccaagatggtaaaccaatccctgactctgtcaaccagctaatcttcaccatagttcagcatttcataggtgattccagcctttggaaagatagatctgccgaactcctttctaatcttaggtgtaagaccttagctgactttagatggtataaggataccttccttacgagagtcttcacccgtgaagacagccaagaatctttctggaaagaaaaatttcttgctggtcttcctaagtccttaggagataaggttagggataagatccgtagtcagcaccctaacaatgagattccctacaagcaattaagttatgatcagcttattgcttacatccagaaggtagccttgaagatttgtcaagatgataagattcaatatcagcttgccaaagaaaaggctcaaaatcacagagatttgagaaatttctgtgaacagtttggcctcccttgctccaaacccaggaagcctaggaagcatacccataattctgataaacagaaaccaagaaaatctgtttatcatcgccataagtctggtaccccacctagaaagcttaggagagaattccagacaaaacctccctttgacaaggtcaacattcctaaaaaacccatagtctgttggacttgtggcaaacccggccataagagtcagtactgtaggcttaagaggaagcttaggaaccttaaccttgaaccctctgttgaataacagattaatcagctcttagtagaatcctcctctgaagaagaatctgataaggatacttctgaaggtcactcttcaaaaaatctgaatcaaattcaagaggatgatttatcttcgactgatgaagactgtccttcttcttcccaggtcaatgtccttacccgagagcaagatcttctttttgaggtgattaattctgtttctgatcccgaagaaaagaaaaatcttttgtttaaacttaaaaaatctttggatgaaccatcttcttcgtcttctaaaactaataatttgttaatcaataataaatttaatcttaaagaaactcttaagaagtttgataaaagtattgttaaaccagtaaccctccaggaccttcagcatgaagttaatcaactgaaagctgagattcgccttattaaggaacaacaaagtgttcatcagaatattttgagtgttctgcaatatggtgatccaactgatgaggaagaacctgttcagaataaccaaccttctgataatgattctccgatgatctagttaatcctgacattcctcccaagatttttgaattaataaaccagttaacaattcaaaaattttatatcaaggtcaagattattgttggaacctttatccttgaaactgaagctctgtttgatacaggggcagattcaaactgcattcaggaaggattaattccaacaaaatattttgaaaaaacttttgagcgacttagtactgctagtagatctaagcttcgcgttaatttcaaactttctgacgctttcatagacaatgatgattttaaagttaaaacctcttttcttttagtcaaaaatcttaaaaattcgattattttggggacaccttttatcaaatccatcttccctataaccatttcagataaaggtatttctacaacttatctgaataaatccattactttcaagtttttaaaagatcatattgttagaaacttgaatcaaatcttttttaagcaaaaccaaattaattatcttaaggaagaaatttcttataagaaaattgatgatttgcttaatcaacccgtcatccagcatcgtatccagtccttgtccaaccaaatccaaaactctatctgtgctgatcttccaaacgctttttggcaaagaaaacagcacattgttgatcttccttatgaaaaagatttcaatgatcgacaaatccctactaaggccagacccatccagatgagtcaggaactcctcgtccattgccagaaggaaatccaagacctcctacaaaacggattaatcagaaaaagcaagagtccttggtcttgttctgctttttatgtcaacaaaccagctaaaattgagtggggatctcctcgtttggtcatcaactacaaacagctcaaccaagcgcttcagtggatccgttatccgattccgaacaaaaaggatcttctcaattgtcatttttccactaaaatcttttcaaaatttgatatgaaatctggattttggcaaattcaaatcagtgaaagggattgttataaaacggcttttacggtcccttttggacaatatgagtggagagtcatgccttttggattaaaaaatgctccttcagaattccagaaaattatgaatgacatttttaatccttacacttccttcatcattgtctatatagatgatgtccttgttttctctcaatctgttgatcaacatttcaaacatattaacatttttatccaggtaatcaagaaaaatggtcttgctttatctaaaactaaaattaatctttttcaaacaaaaattcgctttcttggtcacaacatctatcagggcacaatcacttctattaatcgtgcgatagagttttcatccaagttcccagatcaaataatcgaaaagtcccaactccaacgttttcttggttgtttaaattatgtggctgatttctttcctcagttaagtaatctagccaaacccctctatgaccgtctcaagaaaactcctcctccgtggactaatgttcacactgatctggtcaaacaaattaaatctcaggtcaaaaatcttccgtgtctttaccttcccaatccttcagctaaaaagattgttgaaactgatgcctctgacattggttatggtggcattcttaagcagtctgttaatggcaaagaacaaataattgcattcacttcaaaacattggaatcctgctcagcagaattattccacagttaaaaaggaagttttagcaattgttttgtgcatatcaaaatttcaatctgatttgcttaatcaaaggtttttagtttgtgttgattgtaagtctgcaaaagagattttacaaaaggatgttaaaaaccttgcatcaaaataaatttttgccagatggcaagctattttgagtatctttgattttgatatagaattcctcaaaggtaccttaaactctctacctgattatctcactcgtgaatatttacaggggagaaaccagcagtagtagtcccatgccaagatccgaaaaatcatcttcctcctcacgaggaagaggaaaaggcagaaccaccaccaaaccaaggctagctgtggctggcttaatcgcccatgcagggcatggatcttcagttaaacaagaagaagactccaacaaacaatcaaaatctgggtcatctacccagtctgggtcattaacccggaaactacctcaatctattactgggtcatccacccagaaatctgaaccccaaactgtttctggaccatccactcagaagcctaaacctctctctcaaataagagaagactatgccatgccaatccaagtccttttggaccttcaagaacagggtcttacccacctcccaaaaggcctcccatctagaacatgggcagacatcacctctgaagaagaagaaggagaaagatgggtggcaaccttaatcaaaaacatggcagagacccccctagtcctccatcaaccaaaaggcaaagccatagttcaatagcctgaacccttggcaacccagaggcctaaatcccaaacacaatacgtcccaaaaacaagtatcaggatgtcattcagatggagcctgagttttgggactcaaaaccaaccaaagtcctccagaaaatctttcccaaagatattcagggtaatcaataccatttcaaacctgcctccttgctcaagactagacatttttatgagtttatcctggtagacaccaactcagtccagattaagcatcataagaataaagactctgagcaaattgcttattcaactctgcaaatccttaaggttatgacaccaaaagaatttggagaattgaataaaattaaaaaattttctcaaaactatgatcccatgggtttttcttattgggattatcaatctgcctggtataatgtctttaatttccaaaataaagactttatgcattcgtggctcatctatttcaaacaaaatgtccagtacaagtttccccagtggtttttgcaatggtggaatttctatggaccaatccttgagatacttccttctgaggtagtatctggtctcacaatctttacgaagaagttcgagcaccccgacagtgatccatttccggtagacctccacttcttcagcaaactgtctctcgcctggatcttccaatggcgatatgtctacagcaacgtttcagtcaaaggacaactgccaatgcttcgcaggcaagctcttgtcaagtggtggccccagtttgaccattcaagagctaatcccgaacaggtatcactctggttcaaacaacacccgaccctaaccagagcagcagacccggaagcatgcaagttcctcaaccagagatcacaggtcatagcagccttggcatcctccacatccaaggagaagttcaaggaaaacatgaagatgatcatcaatctgttggaaaaggagaatgaagatgcctgctcctcctccaagaagcaatctaaggagcccgccgaagactcttcagaatcgtcggacgatttctacaggaatgaagacgactgtttcggcatcaaccttgatgatgactaaatctagctaggtcaccatcctaaacagcaaagcagaagggtaagtggagaaagctccttttgcttaaatcagcatgacatcagcatttcctgcggcagactactgttcagtattgttcactgtagcggtaggttttccggtttttgtcaccggaactatagaaacaggaaaatgttgtatctatttaagggctgcgtcccgcaatccgtaaacatgtttttctttcctagttttctttcctcagagtgttcttcctaggtacacctctgagcccagagttcaattatctaatctttctgtaatctttttgagtaaataaaatctttatttcgtcatattgcatgttttgtttctgtaattagacctttctcttctcatccactccctctcatcccgatggcttgccgcgcttgagagtataactttagatttatgcattaaataaatttattttgttatgttctgatagccatgtgaattccgtattctattcctgcttctcatttatgttgtttgttgtatattcgctttccccgtcctcgcttccaccccatatggtatatatatatacaaaaatataaattttttatacatgttttaaaatatttaaaaaaaatcacaaattaatataatttcataaataattagatatcaaaatgtaaaaaaaaaaaaatcattatccaagttcaaacaaataagtaacaaagatcataaacataagctaaataagtttaagtttaacatatgttcctaaacaagttcaacacttcaagtgttttacggccaaggggcataaactaaaaacacaaaaatagtggatgtcccgtaatgtggaagcatcctgttaaggcaacaaaagccccacaaaaaaaacaagtgaatgcaacgtgacgcgattgttctgctcagacgaacaaggtgtaagcgttgcggacgaacaagacggaaggagctcagatgaaggttgcacaaaattggaaggaactttggaactgctaggcacagttgaagagagtcaggtaattttgaaaacctagtggagaaacgatgttgttcatgtgtctatagcgttttttataatagcgacccggtccggttgacgagtcgtcggtttgaccaccgatccagtctggatttattgacagacttgacccaatccagccatcgagtctcggtccgaccagtttgacctgatgggtcgatccagtttttaaaacaccactcatagggaacccttaggcgcaagcggtactcgaagcagaggagtaatgtagtcaggctagtactactactagaattgagcaaacaggctttggggtccatagttcatttgcaaactcgtatatataagtgtccttttagaattaatttaaaatgcaagcattttagcccagtttattcactcgcatgttaaacaggttttacttgtaggctttttaaaatttaatatacaatatataaactaataaataaggggcataaattgagaaaaaaatatttttaaaaaaatatagaatttaagtactatatatatgattcaatgataaatgatgataattttgatttagtatagacttatagattaaataaatatgatatagaaaaatactttttaggtggcttaagatacaaattatattatcattttggataaataattttttttatttgataattcataattagtttttaaaattgtttaaaatggatccaactttacattttaaaatttaattttttactttttattttttttctaatgtgggttagcctgctaatcccgtggactatgtagggtaagtacgagcttgctaaaattgagtatgtttggaatgcagacttcgcatgacaggcttcgtggttacaggttttataggcggacttagccatgcccaactctagttattagtatcatagttataaaactcggttcagaacggtcaatcagatcgatctaaccgggatctggtgatacaatcgaatcgagtacaccatcaaatcgctcaagcaagtgacccgggataactataatgaccctgaggcctgacgcggatagcgcgggtttcgcgtggatagcgccagggttcttctacaaaaaaatccagtgcagaggtgtggcgctggtagcgctggtgtggcgcgatcagcgccatgctcactgggttgtggcacggatggcgccaagatggcgcgagaggcgctagacctactggaggatgacgccagtggcgccatggtggcgcgggtagcaccacaggttctgaaggtcaacgcttgtagggccaaagtggcgctggtggcgccagaaaactctggagacctgtccatccctggaggttggcgcgggtggcgccgtggtggcgcggttggcgctgtggtggcgtggttggcaccatagtttctggaggttggcgctgttggcgtgggattggcgcagatggcgccatggtttttggcagctggcgcgatcgacgcgatagctctgacaggaccactataaaagggggaagtcgcgattttggagagaaaaaccttcctttctcctttccccagtgccccacctccattgttgaagctccaagcttcatttcttcaccatagttcaccaaatcacttccttaatacaccaatcttgctagaaacacttggtgagcttgaatccttcatcaaattccccttagaaaccccaaatttgagaatccctttctcaaggaaagttcatagaactcgagttcgtcgaggaacggcggcgattcgtggacacccgagcttggggaagtcgtccttgggccttccttgtcatcattgaggtaagaaactcgagattcaccagttgatttgtgagttggggttttgggtgaatagtgacccacttgtgatagagctagtattaggcttgggtcctttagaaacatgtgtttagaatgttgtgaggatgaaggattagctctcaaatgttaatttggtgaactttgcttcttggctctatataatgcatgtttagttggtatgctgagttgcttggctatgttgtgacatgcaagagccttggtatatggtttttgatatgctcaaaaggcttttggaacggtgtcttgtgtgtgaaaagaaccgttcaagccatatgtgaatccttgagcctttggtccgtatagagcttcgagctcttaatgttggcttgaaccgagttctgtgatgactcaagtgcattgtgggcatgagatagaccactaagggtccatgagatggcttgtgagtgatgagccttgatgaaccttaagttagaggacttagaggttttggaaaagaatgaggtacctttctttgagacggttgagaaccgtgttattatgcttatgccttgtgtggttgaattggctttgatatgagcttgtgtgccttgtatagggcgtgacaccgagggtgtcagtagtgtaaaccacagagcagggaaagaactgtagagctcagctttgctagataagttcttggtcccttggggatgtttcccacttgttgtgttccaccacactctgagggagtgatggttgcattcatgatgcattcattaatggttgttgcatcctcataatgatatgtatgcttgtatctatgcttgtatatgtatgatgcctgttgatagatcttctggccagttagatagatatggacctccctaggagaagagtgcacctcctagtttggtttgctcatggttgatgatatcccagggtgatgatgatccccttaaaaccaagagataggtggtcccgtcgcggttgaagcctattctcggaggtaccatatacgtgcgtccatgcgtaaggggtagctcccgatgggatggcacgggtgtgagttccgatctcacactgaggttggtgttgatgtttatccaccgtacatagagcaagatgacttgcttgtattgttatgagggccgggtggccagtatgtatgtgatgcctggtgacttgtgtcatggaaagtgagccatggtggaggagatgcctccaaggaccctgagcttactgggatgtatatctcaccccgtgtggggcttatgttgtttcagctgactcttctggcagagaggagcggtcttagggcgggaggccctagtagagataggatctgcttggctgtgtggcagcagagagagctgggaggctcagtgatgttttgatgttgttttgtacccctgtagagggaagacgtgtgtgtgtgtgtacacatgtattccttttgtatttgtatatgttatgtatgccctcgtgtgaggaaggatcttagagatcaaaagcactcggatgcttattcttttgtatagacacttcgagtgtcagatggtgtatatgtacataaccagcttatgttatgtaatgatgtttcctcctatttctatctattgagacatttatgtttatctgcctttggttttgtgaatctggatcagcaggggcttgtcttgttttgtgatgagatgttttatgttccatacataatataatcaagaaatatggttttcgattatgcttccacaaagtttttaattaaagtgattaagcgctattctgataaataataatgttaatactccgggtgcacacggggtgttataataacccgatcaaacccgatcggttttgatgaaaaccggtgacctttccgatttttaaaacctgaattgggttgtgccaccgttgaattgtgaggtaacttgccgcgtcggcctcgcctctgataacgcggacgaagaggaagcgaaagaaaggaagaggaagaccaagcatagaagtggaagaggcggtcagagggtgttgttacgttaaggtaatggaccgcttgctcttgttcatcaaaaggcaggctaagacggtaaaaagacattcgttcttccctcttttccgacccatgttgcttatttgacattccatacataggcgaaaggaacttgcagtgatgccttttgggttgtggtgtaagtcaattgctttttgggcatttagaccaagcattgaagtggaagatgaaaattgcaaagtgaggcatagccgcagtgccgcaacaacgagagaaatgaggttgaaatggaagagagggttatataggattagggtttttcattttgggccaccagattcataaagggcataaacagatttgcttcctgcactcctttattgcttactgcactccttctggctttttaattaaaaactaaacttgtattttaatttaagtagttgctatttacaatcttttttattaatacactttacttgtgttatcaactttaatacttcaattattattttgaatcttttagtatacttttcttaatcaaataatattagttatatacttatatataatataattttaaaatttttgatatagatcgaaccaaattatattaattactgacccaccaattgaaccactgactcactacttcaatcgggttaataatttggccgaattttataagtatgattaatattcatcaactgccatgttaaagggcacatgccctgccataaaatgaaggtatcaaggaatcccctatatgtgaccaaattgacatacgactatctggtagatatgcacaaaagtggggaacagtgcccaaagtgccacgttttttttaaaaaaaaacccataatgccacgcctacaatagtgtttgccaaaatgccacatggcataattcatggctctgcacgcgaaattggtgggctgacgtggcgttacgctattaggacacgtaattcgctatacgtatcagcgaattatgtggtctggacaggcgaatttcgggcaggacacgtgtcagggagggagtagtttgcttggtaggctagcaaattacgtgggttctgacaaagcatgacacgtggcaagtttgaggcacaatgtgtataaacttcgaacggtcataacttttgactggaatgtccgatggaggcatatgatatgtcaaaacgctcaaaattcagtcctttagccttgggcaaattccaaaggagattttgtcaaatattttttccaaaaaaggcctctaagtgcctgaaaattaggatttaggattcaatcatctaaaaatttccaaatcgtctacttttttaattatttaattagttaatttaatgcaattttatatttttttaattacttctctcaattacgatcgttttgacataaagtacgtctccatcgaacattcctaacaaaaaaatatcattgttcgaagtttatattcactatcaattttacaagcgaggtagggttaaaggagaggggggtttatatagcggtggaccagttgtacctaattcgttgggctcactagcgaattacctatttcgctgctgctccttgtgaaatttgccacctgtgttgaccgctttgcccgtccaatagaagcatgccacgtcacgtcacgtactttgcccacgtgcgcaacaaaatatgtcgcgtggcattttggaaaattgttttttggacgtgacattttggacaaattttttttaaattgtggcactttggccattgttcccaaaagtagttgccaagtcaaaggaagccagaaaagtatgacatctcgtgaaacacatacaactatttatgatcctcaaatgacgtcaaatgacatcatctagttggagagagtacacgatctccctcgaggactcaaaatgtccaaatcccttgacttccatctttgtgttcagtgtatgttttgtctgcctcattgcctatcgacagtagaaaaatcctcaaactcctatgcgtactaagcatattaacataaatatctatagtaaaacaaaacaaaaaactagaattgcgaaacaaaataatgtacaaaatttttacttgaataagggctatacatctaaaaattggtgagtgtttgcatgctagtatcacttagctgcttgtacattaaacatagggttgattttgtttttcaattggcaaacgttaatgttaatttttatcagtgaaaatgattgaactttcgacttttccttctttttttcttcttaatcatctatcccaccttttatatcctacattaaacagaaggtagtaaccccctatgcatatcagctacacatcagctaagatcttaaatgaccaacaagtggcaagtaccgactaatgcataggatgagctcctctagctaatatcaagcaacaaacagctatacaaggtaagcatgtgttgcatagatcgtctctcctactaccaactgctactcatataagttgctcagttaggagaaggttgcacgtaagccgcccttggaggtagctgactctaattaatgattataacatcttattacattttatgattattattgttattacattttattcacaatttttctcgcaataagaaatacataaaaagatagaggatgttacaatgactatagacactcgtagatataaccatatatcgataagttttgtaggtatatgcttaagaaataccaatggcaagtatgagataaacataggacacatttttatcttaaagggtgggtgatttgggactactacttgtacgtgtcccacctcattatgatccttattactatttttagacataatatttttggaaatataattcctaagaactcaatattaaatatttaaaaatctctctctaaaaacaatcagataataataatatatatatatatatatatatataaaagtaaaattcttgccaaaagaagcaactactcaaatattaataatttgaatgatagtttgtgatgatattgataagatgaaaattaacaaatgaagaaaagattaaacattctaaaattgattaaaataaaaattaattaaagattaaaaattgcaatttcagtttttggggactaaaatcaaagaataaaaattgaaaggtgaaaatcttgtaggcattaaaacctaaattttaaaatttattatataaaaactaaaaaatatttcaaaaaattatatcagataatacatttatgtgataatacaatataaaatgaggttgtcatatgacatttatgtcacatgactctcatgtgtcatgttaacatgaatttttatttgacatcaatatttaacaatgttattttaacatcatggattaaaaatactgataaaaagttaacgagggattcaaatttgtcaaactttttcataaagaaaactgtcagtttttttaaaagaacctaaaaatcgaaataatttaacgactaaaagcttatttaatgttataaaaaattatatataaattaaacactttcaaaaccatacctaagaaaaaataaattctttaacgcgttaactcaccagaatcaacaaactacttactgtgccaaagtacatagagtcgtttctgaaagaaatgcatgtgagaccatcatatcatctaaaaatatactttcgtacgtcttcataagtgacaattaatttgaattctgaaagtgtataggtaatataatcaatttaacgataaatggttcgtgttaattatattgaccaaatgcaaacataaagaaatcaaatcaacacatgtaaaagtgatcaaaatgacattatttttaccaatgtgttgtggttcaattgaaacatagatttggatttcttgaataagatttgaagtatgagcctcataattttattttttttataaaaaaacatgcttggaaaggaaaaataaatataaaactttgtatcaataatcttataacaaaattgaaagatatgttgcaacaagaacataataacaccaaaaaaatgaccttaattattttgttttattttcaccgaaatatttatatgattttatatacatacctaatttactttttttttttactaagagtgtttattaattagttggttgaataatatatatgaattattataattttttgtattgtaagttcaatttttatgaataaaaatacattttccttttacttttttctgggtatttactaatgtgagtaactcatgaatgtgatcagactgaacacgtaataccttattcatgtgatcaatctataaaattttaatcggctaacaagttctattatttttaatctgatcaatccataacatataattagatttattattattattgttattattgttattattattattattattaataattattaaatataaaaacattaatttttagctaacatattttattaaattattaaattaaattaatcataatttttttcttttcaagttattatttttatctttattttaattttgtttatcttttctcatatcaataaattattttatttctatctaaaagatattatattaacattgaaatcattaattttattagtcaaatattatcaaaatttaatctcttttaaatataattaattgttatatacttataaaattttatataaaaataaattattattttaaaaaaataattttataaaataaaaaatattctttaaatattcaagtccaattattcaaactcgatccatttcaattattatcaagttaatttgaattaaatctattaataaaataatacaacccaatccaataagtttagcgaaattcaatcggtaaacacctataaattgttttatctttcttatctaaacctaacataccacaccacttcatttctgcctaaacaatcataggagaatatggatgttcatcaaccgatccaaaccgattcaaaccgcggtgaccgaatcgataaccgaaataaccaaaaattgaaaaaacgaaaaccgaaaaaaaattgaaaattttcatcggattggatcggttttcgaattggctggtaaaaatcgatccaatccaaaccgatccaattacctacttaggctttttagtattacatttaagttacgagttcaatttgaaaattagaaaattgtgtttgtttttgtccaatgaacatgtttgcaataaggtttcattgctctttattttgttcaatgaacgtgtttgtctaatgaaaattaaaaaatggtgtttgcttttgtccaataaatgtgtttgtttatgctatatactctttattttgataaaaataagtctctaagttttatttttaaacattttaaaaaactgaaaaccgatccaatccaaaccgaaaaaaattgaattgaattggatcggatttaaaaaaagttcaaatcaaatagatagtcaaatgatcaaattgaagagattggatcgaataattttttattttaaaactgattcaatccaaaccgcaaatagcctagaggagaagacgaaatgtatactagtaccatcaattcaattatcaagttgattttttatatttttgagagccacgttgcaatttgcaatggctgtctgggttcgcaagtgaagggagcgcacgtgcaaggggcagcaggggtagtggctgaccgcgatgcacgggcagctgttgtgggtccgcacgacaaggacaggtgaatagaagcgccagcaagaccatgtgtcaggtgggtcccactttgatggttattgtcgccttctcgttcattgtgggtcccttgccccgtcagctccatgtttgcttttttcaactttttttccttctctctctgtcatcgctatttcatttcattgtataaaaattattattattattcaaaagaaatgaaaaaagtgaatctttttaatataaataaaaatattaggaaaatttttatgcttttcttaatatatatatttattcattaaatcttattttaaaaaataaaactcacaaattaataataaaatgttaaacaatgacctttgtattactaatattcttttaagcacaaattctctttatattgaaggtgaaatgacctttctcatatccacggcttttaaagactctaattaacatttattttgttttaattttgaaaataattaaataaaaggtttatactttatagtgagccgaacattgcatgaaagacattaaattggatacgtaacgagaactatttatcaataataacattaataccttatttgaataaataattgcaatggttagttattcttagcgctataaatgatacttttttgggtatcatttatttatattagggtatcaatactcttagcaactaatgattatatttcttaataaaagcaactaatgattacttaaatacatgacccactaatttgatttaaaaaataaaatttattatatattatattttgatagaaaagcacataatttaatatcataatgttatctatcgaaaaaatgttaatgttttttttataaaagtgttgatagttatcacaaaagagaaagatgacggacgaacttttttaataaaaatattcacttatttagcatattataaaattaaggaaaattataaattagttactttattatttatataaagcatagattatcattttggtatgtaaaaattatattacttttaaacaaaaatctttttatgtaagtagtgcccgtatatttcaatcacaatacaaatctatttatatcaaaaattaaaagtgtttccttttttggaaaattcaccattcccactatcaaatttctcttacattattttataattgttctagaattgtgggaagtgacgggctgggtaaagcaacagccataagtggtagctggggccatgcacagcatacacatcatgagtttgtttgattttgatgcgatgggagtgacacaattacctctatgccctttcacttacatgaatttctgaactttttttgggaagcaaaaacgtttcctataatactagtattataaaacgtcaaaaaaatttcatgcgcattttcatttcaaaatgtatgtaactcctgtattatgcttattgtaattagaaataatatgaatagaagagttaattgataaattatatgttaaaaatacaaattaaaaaaattcaagcatacgtcactttttaaaactccataagattaaaacaatgatacaagaatgtgtttacacgtgaatggatgatatatttaataaaaaattgatatttaattattattattattatttattaaattttattaaaccaataataattatgaaaatgagaatgaaatcaatttttaattcaataaattacaagatccttgtaatctttaatctagaaaaaaaaatacgccatttccttttgaattaaccctctaatataaccatgtgtcatatctagagcatagacctcacatgcaacttgtatcttaggaagacataccaagcaaaagaaagattctcatttcatagttcatgagacatttgctatgacatacaaaatcttaaaatttgatcatcctggttgtggcttttaattacttgacatcgcatcatttcccaagtgccacgttctgttcattccagcaagaacagtatcgacaaatagttaaaaaatgttgaatataaaattaaaaggattcccttgctcaaggaacagtccaagtgaagagaacctggttgaagacatgatttatttatttatctttcttttttggtctttttgccattagtcgagacatgattcaattagagagtgaaaaagcaacccattaaggagtgtagtacaaatcctcaacagggaaatgaccaaattttaaaaaggttattttaaagtggaaaggtctttttgggaaaagtacatgtagtgcaagaaactggtcccaaagatttcgagtttcaacttcatgacgtccaaaaaccaccattgcttttttatatttatttatttttaattaatatgtggcccatcattcaaatgggggctattctggtacaccaattgcacgcgctcggacggtccctaccaatcaagttctctatctaacacatcacacatgattgattttattgtattgatcaaaattatttaacgtgaattgttaatttagttaataataataaaattatgttaattataattttttaaattatttttatcagctaaaatttttcttcttctaataatttatcaatatttttaataaagagtatttatattttaaaaataattaatacaagaaatattataaattaaattttataataaataaataaatatcattttaaatttgagtcttataaataaaattataagaaatattaatttttttagagaatatcaattaaaaagatatcttaaaaataattaaaaaattattgtaatattgtttattatttttaattatatttaatagaatataccacaaagaatatcctgatttataatagatttattttttaaattacttttaattccaaaaaatagaaatattttttttgtcacaatgacattagtgtaagaatatatacctattttattcatgattaatatccgttgacgaatctgagatcatcattaatgaaattttttttcttaatcacattttttatcaacaaaactcaaattcgatatattatttaagaaaatcaagtttaatatcactcaaactaatgacttattggtaaaaaaatagaaataatagttatatttttaaaagaaaaaacatgttaattataataacgtaaactatttataatgacaataaatggtaaaattaagtgaaaacagctatatatatgtaaatggatgaattgtttatctataaaaaataattttgcaaaaaaagaagagagagaacataatttaaaaaaattgacgctcttgtcattttaaaacaacaccaaaatgaaatacctattattaaagcatagaaaataactattaaaaaaattagatgttaaaaatttcttacggaaagctatttctttatactaaaacaaatataagtagataataatataattgaagtaatatttatatttttaaaagaaaaaacttaaaaacagaaaaccctatgaatttagaagtggaccagtatctaaaggttttttttttttgcaacttaaagaaacttcaagaaggttattaacatttctgtaagaacagaaaaatacaaaataggcctaagaagctaaagtataatataattatataaacatagtattaatataatattaaaatctcatgattggtgaagagcaggagcatactctgcaatgtgctctaccttatataatctagtgcatgtgaacttcattatataatagccatttttctaaggttccattccctgcatttttctagctccttcttctctaaacactcatctatgactacctttccctcccctccttcaccatcatcttcttcaattccttctccaagatctagcatgttttactatgctggaagtgaagatcactatgaggagcctcacttcctccaagcttgttttctctgcagaaaactactcggccaaaaccgtgacatcttcatgtacaggtattagctcaattttaattcaattcatatcactcaaaccactttcatctgtttatgagccacctagtggtaccccaggttctgattcttgttgatttgatcaactttttatgttaaaaaataaattacactgaattttcatatggggcataagaagttttgttttctttttgtatgttctataccttagttttttcagatctagaataaagttacataattctttgattagttgaagaattttgttgattttttttctctattattgtctgaattaatttttttaacattttattgttatgaatattcatttattttggttgatgattaactttatagaaaaatttgattaattatttttaatgagattccctcctttcaataacgtttttcttcatttacataactagaaactaaaaccttgtttaaagaaattcggtttagtatcacttgaacttaataccttattggtattgtctagattaaccatgtgtgattcatgtagtctattttatttattcattgtgtgatccatatagtaaatttcaattaatgaaaaagaaagatttattattgtattctggattaattgaaaacttgatctaattgtttagatttctaatttctaataagtattttggaattgttgctatgcagagggaacacaccattttgtagcaaagagtgcagacaggaacaaatagagattgatgagtcaaaggagaaaagttggaagctttcttccaaaaggggtgtgagacaatcagagacaaatcaaaattccacacccaataaggctgtaagaacaggcacagttgcagtggcctaatcaaagaataatccatgacatgatgatgagtgggaaagtgtccaatttttgaagaaaaaaaaagatggaatattggaatggaaaaaattccaaatgaagaagtgcaatcatcaataatccatgaagattctgataacccgggatgaatcttcaattcgccgcctttgtaaagaaaaaagttgggttttccagtgggagagcaaaaaaaaacaaagaattttggctccttttgtttctgtttttgataatattgatttgacctttccttatcactattttactctacctgctttgagtgttctataagaaaacaacatggatattcatattaagatgccgttttgttttcctgaaaatcgaggcaatggaaaaaagtatcaaagacacttcatcgaagatctagatgagtggaaactgttatggtcttccaacatcatgtgttgattatgcaaaaatttgttttcctttcaataaaaatatcccttagtcactaaaaattcattctcatagcaactcaaaatctcaattgaaccaacatgtagttgtccaaataggaagagtttggatccttaaacaggtaggttcagatttttggttacagggtaactttaaattagatttgcaaattgggaattctagcatatgaaaaaaatattaattgaaagtgtgtcaaattttgcatctttattttcaccataaattcttagaaaccaaaatatatctctcaatttagaaattcttgcattcatccaacccaaagctttatattcacaaattgaaaataataagtttgagtttaatatgaatctttatttattcgaaagaaataatttatttaatttatgcttacaaataacttgtttcaaatcattaactccaagtacagaaatcagtgaaggttaggttggattttttttttgttggaaaaaaatgattttagtccctatatttttactttttcttgtttttaattcctaaagtttcgtatcatccaatttagtccttatattttattaaaaacatgtacttttacaataactaaattaaacaatatagaactccagagactaaaatcaagaaaaacggaagtaaacaagaaaaacggaagtataaagacaaaatatatttatcctcttttttttatactttaggtgagtttgggttgaaggaatgaaaaaggtgtgaaaataaattgagatgaaatatttgaattaaagtaaaggtgtgtgactcaccaatttttaaaattttcatctcaaataaatcaaccaaatactaaattaaatactaaaatatttaacttctgacaaataaatatttaataaacaatgaattttataaatttatttattatttttacacataaaactaaaatttatttttattcaaatgatataaggaggaagcagtgtacttataattcatactaatttttatataatgaagtattttaactgacttttatacttaaagttattttaaattataaatatgttacatattatttgtttatttattttcttatttattaatttcatacaaaaaaaataatatgaagtataactagaaaattaattaaatgaatttaataatataaaatatattattgagaactaacaaattaatttggtttctagtcttctatcaactcaaaataagtaatatatacagaagcaaaaaaaaaaaaaaagtgaaggggagaaagcagaaggaaaaaaaacactaaatttttatgtggaaaaccttcatattataagaagataaaatcatgggacctagtctagtaaaaacaattcactatgaaaatagaattacaaaatttgttttgctttcctaagaggatcactaataaatctctccctctttgatggaatacacaaactctcgtgcttctcaccaacaaaagtaaaaatatcactctaattaaaatttttgggatgagatacttaaactcttctcaggccctccctttacatagtgaagggatataactccattaatgaatttaacttttcataagaaagtgaatattaatttttcatcatctaagtacattaaccacctaaattgtagtgcggtcctcaaatattacacatcttggtatacaaatgattaattaccacttgtttatggtactttatcaattaggaaggaattccaacaaatgtcttcattattggcttaatttgtcatgcactactatacaaacatcttgacagtaattttcaaccttcttagtttgcatcgaattagtaattatattagaccaactaaaatttatatgtatctttcttaatcttcaatttctttccatctaatgcttctcatgtccaatgatatctaatgtcaatatgttccaagcattggaagtatgaaacatgaggttcttgtctaaataaatggtattttgattatcgtagatcaccacataatcattttgatgtcctaacacactaaagaagttcttcatcatagtatctcttttcaagcttctgttacaataatatatttcttcaatggttgacaatgtaacacacttttggagtttaagttcccaagaaacaacttccctacaaacctgatgtagactttcttcaatccacatcacttgcaatatctacatatgcacattcaatgagcattaaatttcaattgccaaaacataagatcttttaccagttcttctagaataccttaatatccatttcatagcttccaatgctctttttttgggttctataggaattttttcacaactcttatgacataagcaacaattggccttgtacaagtcattacatatataagactccccatagtagatgaataaggtacctcgttcagttctactttcacttctacattctttggacattgaggcttagtttgaaaggtccaactaatggaacaattgtgcatattggatctttcaagaatttttgtcaatataatcttctgaagatatccacaacattcttctaaaactatgtatctctattgatcttcaatcttagaatcttctttattgcacccaaatctttcttgccaaaaaatttgttgaatgccttttttaaaataattagacttaaatttattttaagtttatgataaattaacaattcttatttaagtccttcataaattatcgtttttcttcctctcccaagtaaacctccatgaccacctctcccccaaacctccataaacactgcacccctcctccacccaacatcaccatcgtccaccgcaaccacccaacgccaattccacattgcaccaaacccaccattatgccaccacccaccaatgtcacacacatcaaaaattaattaatccgtagtatacaaaaatgtagtattgattgaataatttgtatttcatttgtattatagttactcaataaataatacatttgtatgtattattgattgagtaatttgtagtacgcataattttatcctttggcatcgttctcgaccttgacgactacctctccaagctcctctgactcaagtcgatagtcaacttccttatgctcttcaagcacaactgtgaagtcaatgacattgccgacaacaatactagatcacatgttctcgtcgtgtgtttagaccatgcttacttcctttttcgctcctactgagtcctatgttggtgctctcataggacaggctctattcgatgatggtgtcacttgtgatgaagagaaagatggaaagaagaagagagtgtacaacatcagaagggtaaaatggaaactttacaaatttgggggtgcattaaataatttcccaccaaaattcttacttgaaaaccttctcaacttgatcaagaaaaaattgtgggacctaatctagtaaatgagtctattttcttaatttttttttaaaaaaaattgtaagaaatgtcggagccaatatcttttttatatgtctttaataaatgcatctaaaattagattaaataagtaacaactaaaaactaaaccttgatataaacctatcaaaaagcgtgaatatacaaaacaaaataattccccaccaagattaggacgtgataattaataacacattaaaattggatctgaccaactaactcagaaaacgagtcaatgattctatactcaccggatccaggcagagggtgaacgcagttgaaaagaggtggcgttgatttggttgaccaatattatttttaaggatcgttgacccaatttttaatgcgtgcatgtaaatttagcagtagggaacaaaaagaaaaagtgacaggtcatttaattttataaaatgtttttataggtgtcaattattaattcaagttgatgaagctgcttacctaataaatattatagtcaatgaggtatagcgtgtaagcttcttaacgatgaatgcttaacaatggcatagtaagtcacagaaacgtaggaaacaataaattcattttaacttgacatctgttcatatgatagagagatatgatcagtgcccaaatgattaatatattataggaggaagttgtcaatttatcatgaaattgaccgttgatgaaaatacatcatggtttcaaaatctgatcatgtgtttaatcatttattaaactgtagtcagttttggtttcacgttcaattattgttaaataaattttaagaatctaattggaatgtaacctcgacataaaggtttatatttttttttttacaattaaaagcttagattatttttttaggaaataaaagtttaaattattattcgatcatatattaacatgtatgaaaaaaaataatttttaggctaaaatgttgatccatctattttctaaatcctttatttgagtatttctattttttaattgagacattttatttttcattttttaaaaatttacaattttagtatcttattttttaattaaaatattttgtttttcactttaaaaaaattcatgattttaatcctattgcaaatttcaaatattatacgtgtgtttcgtaaaaaaaaaggaaaaggacattcaggatttaatttaattgtatgtaaatataaattaatgaatcctatatatatatatattaataatatgaatattttaagagtttatttgaatacaaggttagaagtatttttaagagtttttttattaattttttttatattttccataaaaaagatttaaaaaatacttataacttatatccaaacatgtcctaaataaaaaataagtttgcaatataaaatgttattcccatttcgctctctctttttgtccaacttggaggaaagataaagttagcaagggatatgaaacttttctttcattaatcgttcctctagtacccggtgaaagaaacaaaccataaattcgttcatctatcaaattactctttaaagttcttcaaataaatactaatttgtcgcgagaattacacgttcaagaatcggcataattcaatttagttaggaactaatatggttaacgttttgactttttttcattgttttttttttaaacactattatatgctcttcaaacttggtcaaaaaaatgatatgctcttcaaacaagtagatctgcccattttgcttatatgcccctggctggattaatcgaacttattctcaacattacaataacaaataaaccgtgtccgtgctagtagttgtgaaatctattgaactgaatgtgatataaagagaacaagttatgatggatcaaatacttttgaaaagaaaaagaaaaaatttttgacaagctatataccatagaatcactttctagtttctatattaacaatacaaaggtcactaatatatttatatctctcattcatatcaaacaaaaatatatggccactcaaaagatcattagcaatgtagtgctgttagtgttctccattctatacatcaaccacatagaactttgcctgctttgtctatccatcatcgttggccgagaatgagagaaattattaaatggtctggaactatgtggtctcgatgaatctatacgtgacatatagccacattcttcaatttatgaaaaaaagttaatagcatatcatgtaaagattgaccaagaccacatagacccatataacaatttctcctaggatggacctagttcacagttagttacaccgaggccaaacgaaattttgctagggatgtaactatgaagacacattggctctctgaaggatcataaatcttcttctactagcactctccacactttcaccaagttttgcaagatgttccatcctctttctccataactctgtagaacctgattgatttgccttatcttcagcttcaactggatcattttcagatacctcgatacttttatcatctgcaggctgctgctcttcatcagaatctaggattatctgcttcaatctctctaccacctgactcattgatggccgatctttcgcactcttacacaggcaatgctctgcaagtttggctattttttgtgctcctttaatggaatattctccttgaagtcgcggatccattatcatgtcaaaccttttgctgtcaggaggatattgcttcacccactccagtagtttcttctccgtttccggcctgtttctttccattgaacacctgccagtaagtatttcatatagcaccaccccaaaactccacacatcactcttggcagtgagatggcctgtctcaatgtaatctggggcagcataaccatatgtccccatcacctatcataaaaataaataaaaaattacattaactcagaataatcttgatgatcatgtatttaaactttaaagttttgtgttttttggattatatttggtaagtcatatgtgtagctacataagatatttggtgtgacatgacattgattgagaaaaaatgacctaaattggttaaggtggttttggacatgcacaaaggtcactagaaacacctgtatggatagtagattgcatggttcttaaacttatgaaaagggggagagaaagatcaaggacatcagagaaaattattaagagggatcttatggtgaataatatctgagaatttaatttttagttgagctcaatgacgttatgtgatccatataactgacttcacctattatgacaaagctttagttgtatatttggttaagtcatatttattagtaaaattaagtttagaatctatgcagaagaatatttatgtagtaaacatgggaagctctgtcaccaacaatagtggtatcaataaagtttgtaatttgaaatgaaattatatccacagaaaaatccaacatgatagtctccagtaccaaaattccctgagatcaaccaataaaatataccaatgcaatatgcaaatgctactgaataaggcgtggcacttacagctgttgaaacatgagtatcaccagctactggtccctcccttgcaagtccgaaatcagaaagctttggcttaaagttttcatccagtaatacatttgaagctttaaaatctcgatatatcacctagagcagtagcatactaattgttagaactagaggaagaaaagtttagaagataaaaacacaaaatagtaaaaaataatgcaaaatccaagagtatgttattactacattgaattgccactgttagttaatcatctaaatttatgtgttgaaattgtagtatatagtttactatattgacaaaatcaaacggacaaactatacaatagctgcttgctcccttttcttaaggagtaatctcatctccaattagtataaagatagtttacacctcgaaaacattaaattcttaagggggttgagacttttatgtatattcaacataagtttgcaccttaattatggcattaagctttaaatgttgagaagtcccacagcgtagtgcagcttatatatttgttgagcaacttcatttcacttaacgccaattggatttaagatggaatctaacacaatgaacattcaaattcttatgttgttgtccatcatcatctaaagaatataagttccagtgttgttgatatgaagttatataagaccctatgaatgctgtaagagcctacatttcaaaggaatgaggtttaaaccaatcatggctaagttggaagagaaccctaagtcagaggtttcatcaacagattaaactactttgttatgtgtgcaacatttcatttattaaaatggatggattatctaagctaataaaagaagcatattaaaattagtggtcctcatcctgcaaaagatattctaaactttatgactccctgcttttcagtacaattaatctaaaaaaacgcaaagaccaacatttgaatagccaaaacacaggccattgactggatcatcatgagacaaagggaaagaaagaaaaaatctgccagtaacacagttgacagatagtaagcatcacttccccaaaagagattttctaaaagctatggaaaagaagcatatattcttgaagtgaaagtttccttctcttatatcagggttattagttaaggaacttaacaatctaatgtctataattgcatgagtattttgtcaaaacttagaagacataacttatgtatttcttttttatgtttatcttgctctttttaaggagcaactcccttaaaagcttaatccattcaatttatgcaacatattaatggttttaatttctaacatgtctcatcatgtgaaatattattgggcttgaaacacgtacaacaaaacgtgccccctaccttgtgctaaaatcataattcaatcagaagaatggggcaatgaggatcatactctagaccatgtggtcatagaggcaccaatataatgttatggaccatctctctatagaacttataatgttaagtgatggcacatgaatgatcatatatatatctaactccagttagtgagagaagcaggaataatatataaacatgttgctaaaaatggaacctgaatttctaattcttcatgcagataagataacccttgagctgctccaagaattatttcaagtcttgttttccaaggaagaggatcatatgctttattgaaaagatgaacttctaagcttttgttcggcatgtattcatacactagtagtctctggatccctctttcatcatccaaagcacaatatccaataagcttgacaagatttgggtgttccacaataccaagaaactgaacttcagtcaaccattgcttatgaccctacatcacagaaggaaacacaatcaaaggaatatcctaatgtcaccatattcaatgcaaaaagcaaaaaaagagaacattttagctcttctaagataaggattacacacaaatatgtgcatgcataaacaacaaaaatgtaatgtaattgatatttcaggatagtaacttagatacatagaaatattttctataacataattaacacattaaagtaaaagatccattaatacatcatagtccctttgtacttttcaataagaataatatatggcttcttcattaatcagtggcaaactacacctaaaaaaattataccagacatgcagaaatccaattatgaagttacattacagtataatgtctgtagatgtaaactatgccttaacacatgaaacattcaattcaatcagataaattttcgagtagaaaatatggctataaagtataaatacatcaggaaaagtatctaattaataattgtaatagaggattagtgtctgaattgcctgtaaaaatcctcagcagaactatatatatagcacataatttcaatctataactactggaagtggaaactagaaaactaggagataagtctggaaaaagtcagaaaatatacaaatcaactaccatttattagcagtaaatatacagctcctaagcgagagatcttttcccctaaaaaggagattatttccaacactcacaatcttatttttgtagctaaggtcaaaggatgaaagaagtaactataatgcatacttatagatgtcattttttaactcgactcacttatttatgcatagaaaacatggaataatgtaatgaggtaccactagtcgtttctgagataactgaacaacagaaaataagtctcgtctcagtctcccagtagccaatatacacgtttttaccaatgttagagagtatatagatagcaaagaggatggcataactctctcttttgggtgaggcaaatttctgatccatgcaggatgaggaatatcagtttagagccagcaaaggatataaaagagttgaccatcctttgcacagctttcagtagattggtatatgaggtaacagagacagcaatatcattaatattgatcttaaagctatctgaaggaaaaagaaaatcacatctgtaatcaaaatgctgatcaaagagccaaggctaggaatactgatgaccaaatacatttagtattggctagtattgcatcaaggatttaacagctaaagactaaataccatagataacctggctttggctcattgctttgctcagatctttagacagaggatacaacattaaagcagaaaagtgaaaactctaatatccacaatagttcaaaagcctaatggataacaaacaatttcttgtttcctcattcctaacactggactaaggtgtgcatggacagtgattgtcaatttgtagaaataccaaaataaaaaagcaataagctaccaaaactaaattttctattttgatccactatttctatcagtgtaactttacaccaacagtgaacaagaaaatgccacaatcactatagtaactaaggttttcaacttgtagtaaaaaatttaggctggttccacctaacacctagtgggataaggcttttgttgtttatgttgtagacttgtagtttagactggttctacgcacatggttcaccaatggtgtagaagtatttgcacagaactaaaccattttttggttattttatctatgtttgacctgatcttataggcacaagaattaaaaatagtatgatacaatcttaacgaatttggaaatttactttttctttttcccattgaccgtacatgcatctttagatcaactttcatatcaattgagaccaaatctctccctaagcaaatcttaaggtaggactcctcatattggcttggtgaatttaaggcaattaattcccctaagtattggcaaaatgttcgagtttgagtagtcaagatagggaatggatcctctcatatatgatatccatatgaccttgtcatgtaaagaccatgcgtctagttttgtgaaaaatccatcaagagatagactgaccaaaatttctgcatgacaaaatcaagtaaaattttacaggaaagagtccattgccatcaagatagagcgcacatctcattaaccgataattgacattgaaaattactaaaataaaatttgaaggtacatcaagtaatggattctgtattcttacctgtgaggattccaagtccatgggctacgaatattgacattgaaaattactaaaataaaatgaaaaactctaaatagtcaagtatgacataaaagctggatgatatttctgtgatggaccacattacatgaataaaaacaacatcaaagaaaatagaggtaacaactaagaaattctaccttaaccattttatctaaactgaatttatgctctttatatttactcatctggaaatggggaccaaggaactctaaatgctctctaaattttaaacataaaaagtttatatgccattttctgacaaattacttctcaaggaatttgttgagtctcatacctgtaatgcattcttgttaagccttttgatggcaactaaaacagaattcccattcccgtcaacaggcttgattgaacctttaaacacacttccaaatccaccttctcctatcttaagaagcatgctgaaatcactcgttgcacgcttgagctctgtgaaggagaagtccctcaaattttgacccttctcctcatacagttcaggtataccgcgaggcgatgcagatgagcacgaagacttggtgacccttccaggtcctgaaaactcgagtttctcttggtctttaagttcaggtgctgacctttgcttactgctcctagatttgtctctgaaatagtaaaagcacttcattgcataaacaatcagctatgattctaatccacagtctctgatcaacctgttatcaattacacaaatcaccaaaaacaatgattgtcaagaataaaaccacatcatataattactacctagaaagaagaaaaacacaaccatgtagtgaatagtaaaagcatttcatagcataaacaattatgctataattcttctgcacagtctctgatcaacctgctattaattcaacaaaaccaatgattgtcaacaataaatctccataatactattaccatctagaaagaagaaaaacacaactatgtagtgaatagtaataccccagatgcatctgcaaactaaagatgcataaagtttcaaaatataaaatttaagcaacccaattgaacaaatagattaagcaacaacagagaaaacccagaaaagaaatcatactacatacaactttgaaggcaaatagcacttgcaaaatgaaccagaatcagctaagcaacacaaataagcctccgaaggaaaaataaaactattcaacaaagagcaaaatggttgaaaaattgaaggtatgtaattgaattgaatcctcacaggcaagaacacagagaagcatggctaggctacagtacacgttcgtgaagcttgaatttttgcaacttcaaatatgttaattttcttttgcttctttctctctctctctcacggatatcgaagatggagatggaagtataataaagaaagttctctgaaagttgtcctttttcattgattggttgaccaaaggccggccagccagcttgctaataagtttctgttttttgaactttgaagagacaaagatgaatgcattgactaagctttggacggatagttttttttttttttttccccttcaaagcatcaaatctcacattcaccgacttatatattcatttaaattttaatagagacaaaaaaagtataataggcatgtattataaaaccatcacagtcttatcataatgagacggattatataaatcacaccagatcatttcacacaattaataatcaagatttcaaaaatatgatttagtttaaaatttacatcacatcatttcacacaattaataatcaagattttagaaatatgatttagtttaaaatttatcttttggtttattttctattaattgactaagttaaaatcatataagatggtccatttatcttatcttcttagaattaatttattgctaatattattagctaatcttatcccttatctttttagcaactaagcccatgttttatgcatatcaaaaacaatctctttgatggaaagagattataaaggagatgtgcatcatggttaaggtcactgtgttttctatctgaaaatctcaatacaacatcagtgagtgatagttaaaacatagaagatcttcaagccaaaaatcatattagtttggatacccataaactgtttacatattatttgactaacagacaattacaaatcatctttagagcaaacaagactagcaatggccgaaggtaattatgatcttaatttttctgcacttgatctaattgcttatattgattgtgtataagcatgattagattatttaatttttcttacatttggcatcagagccagttttgcctctgccttacttttgtttgatagtcatatatgtcaaatattgtttcattgaaatatggatattttatttgaacgttttaattattaagaagccttggaatcatatggaaattgatttctaagctttcgatttcggtattgaaaatgattgagaaaatcattggatttttattttggttgaaactgggtcgagtcaacccatctgaagatcgaagacaatagtatcaatgaaacatgtttcaatttcgtggctttgagttttgtaaaattaacccgtattcaaatcttgatttttgtatcactttgatcttcatgaaccaaataaatgactataaagcattttgaactaatgacatttttatgatgtgttcacattgttatttagatattcagtttatattttttttattccataaagataggaatatttagtttatatcttttattccataaagatattaatgtttagatattcagtttatatcttttattccatacaaatattaatatttagatattcaatttatatcttttatttcataaagataggaatatttaaatatttagtttatatcttttattccataaagataggaatgtttagatattcagattatatcttttttttattccataaagataggaatatttagatattcagtttatattttttttattccataaaaataggaatgtttagatattcagtttatatcttttaggaaaaccttttctgtatgtggtccatttacttcacttactacatgtattaatttgtgtttataagataatattttgtgatatatgttcacatgatttattgttattatgtcattacatgtattaatttatgtttttctatacatgtaatattaagttgattatctgaataattgattatttaattttattatttatggttaattacaataaaattaattttggaaattaaataatatttagtgatctttataatttaattgattaaagcctagccacaataactttaattatttaaattatatattaagagtctctaaatcacataaggtaaataatattaattgtaataaatcataatataatatagtagatattatcccataggaatttctattatatttttgtatgattaattaggataaaatattaaattatatttttttgatttgcccacagggatcaagaaatataacttgatagttttattataatgtttgtgtgaatttaattgaattaaaattttagcccacagacaaattttatgtcgctaaattcataatttaataagcatgacttacattggtaaaacatgatacattatttttatctcaaattttaatgataagcatatatgttgaattattttgcaactatacaacatattaatacaattgttgtcccggaattgagaggagattattttttctatttggaaggaaaagattttgttgacgttaaggtatatgaacattgattatgctatcttgaaagttgagccaccagaaattatagagaacggtgaaccagaggagatggatctgtatgagaaatgggaaagatccaactgactctgtgtgatgttcattaagactaaaatacaggctgatattaagggctcagttggacggtatgacaatgtgaaagtgatcttgaagtacattgataaacaatttgagacttcaaggaaggcattggccaataccttaataatgaaattttcttccatgaagctcaatactctgaggggtgtgcgtgagcacatcatgcatatgagggacattgcagctcaactaaaaactctagagatggacatgtctgactcttttctagtgcattttattatgaattctctcccagcaccatatggtccctttaaaatatctggacaacacataaagataaatggtctattaacgaaatcatgaccatgtgtgttcaggaagaggggaggttgcagttggaacaaggagagagttcttttaggataataagaaagaccacaagaacaagggaagtggtaaaataccaccttatgctggaattaagaaagaatccaggtgtttcttctataaaaggaaggggcacatgaagaaagattgtcctacgttcaaactatgatttggaaaagaaaggtatgcctacctatttaatttgcaaaatgataccacttatgatgctatgcatgttaatgttggcacaaaacgatgtgttatgaatgaggattcctctatgttatgacacctaagattatgacacatctctatcgggataattaagagattggtaaatgaagggatacttagtgctttggattttgctgattttgatatttgtatagattgcattaagggtaagcaaactaaaaagtctaagaagattgcaaagatgatctcaaatctattagaaatcatacatacagatatttgttgtccagacatggacacaagtagttcaaaataatttatcaccttcatagacgattcttcacgatatatgtatctctacttacctcattctaaagatgaaactttagatgtctttaaatacataagttatatcttctaagttttgacaaaatactcatgcaattatagacattagattgttaagttccttaactaataaccctgatataagaaggaaactttcacttcaagaatatatgcttcttttccatagcttttagaaaatctctttggggaagtgatgcttactatctatcaactgtgtcattggcagattttttctttctttccttttgtctcatgatgatccagtcaatggcttgtgtttttggctattcaaatgttgatcaagcaggacaaatgaagtgatgaagaggcaatgcatatggtgaatttgtataggactaattttctgctgaagatagaccttgacaagcaaatactatcttggtattttactatcctgcgtattaggaataatcttgattcttctaactattttgatatttgaaactatcttagactcttagtcacaatggcattggtacatggtatctccttgaaatgatatatgggagtgcactttctcggacttagaggtatcattttgcaaagattaaagatgctgacattgcaataagattggaaaagatgcgtgttgaagaaggtcttgaatatgaacaagttgctttggacttcattgctgatagatcctatggttctctaagggatgttgaaactatgcttgatcaactgagtttgcttggtaaaaaaattactattttcttagtccacgagcttgtaagtgttgtgctttgttttgtgtgttgatgggtcaagagggaccctcaaatcgattgtagaagcgaaacaataaaatgcaagaagagagagatagagaagaacacaatcaatttgtttaacgtggaaaaaccttctcaatgtgaagaagtaaaaatccacaggacattggtctagaatcaaacttccactataataataatggattacaagagtcaaacttccctagcctttcactagagacacaatcaagcatcaccaagtatggtggtattcaaacttctctaaagagatcacactcaaatatctctctagagatttctcaaatgcaaagcacaaggcttgctcaaacgtgctctcaagaatgtcacttgaggctctcaaaatctgtcccctcaatttttcaatctgtcaatctaaaatctctctctctctgctgccttcaccctcaactaaggtatttatagtggtggagtaggtttagggttttagaaccctcaatgggcttgggccaacattggaggaggaagcccaacccaacaattgtccccctccgacttcaatgcagaaggtcaacaacccgaaaccccttccggtttcagtgcgccgggttcacctacaacccgacatcttcacaacaattttcacttcgggttcaccagtaacccgacaccttcacaacagtcttcaaattttcttgttggtaccgatttagtcatcatatcaaaccaattctagtcggtgtgcactttgccaagtgcgagctgtccatcttccaccacatcccggatttaatgatacctcaaatcaatatgcttagtgcggcagtaataggttgatttctttgcaagatgaattgcgctttggttgtcacacttcaactcgtacttatcttgatcatgaccgagttcagagagaaacttcttcatccacaacatttctttgcttgccttaggaacgacaatgtagtcggcttcagttgtcgaaagtgccacacacgtctgcagtcttgattgccaggaggtagctcctcctgctaatgtcataaaatatccagttgttgactttcttgaatcggaatctccccctaaattagcattcgagtagccttgcaacccggcttcaccttctccaaatcggaggcataaattggttgttcctcttaagtacctgaagatccacttcactgcttcccagtgctctttgtcggggttcgatagatatcggctcaccattccaactgcatacgccaagtcggatctagtgcaaaccattgcatacatcaagcttccgacggcagattggtacgtgatcttctgcatctcgtctttatcttcatcagacctcggacactgcttcttattcagattcatgtgcctagctagggggtgctaactgttttggctttgtccatgctaaatctcttcaaaaaaatttcatcatacttctcttgacttagccatagtagcttcttctttctatctcggatgatcttacttctgagaatctgttttgcagggccaaggtccttcatagagaaggacgaattcaacgccttattcagagcagttatcctctctttgctttgccctataatcatgatgtcatcaacatataataacaaaattaggaaatctccagtctcatacctcttcacaaatacacagtggtcagcttcacaaacttgtgcttattcatgaaggatttaaaattcttgtaccactgtccaggtgcttgtttcaagccatagagactcttcttcaaccggcataccatgctttcgcatcctgaagcttggaaccctttaggttgctccatatatatttcttcctctaggtctacgtgaagaaatgcggtcttcacatccatatactctacctcaaggtccattaaagccgccatgactaacacagttcagaccgaggtcatcttaataacaggagagaagatctcctcataatcaattcctttcttctgattgcagcctttcactacaatccgggctttgtatctcttcatgtttgactttgtatacccacttgttcttcagagctcgtcttcctttaggcagctcaatcaattcatgtctgattttcatgaaaggactttatctcgtcctgcattgccttctcccattcttctttttctgagctcattatggcctcatcataactctgaggctcaccgtcttcagcaatgacggtgtattcattagatgggtaccatgtagaagttcttctcactttagtggggtatctcggctgttcttcttcagcagcttgagaacacggttcataattctcatcattaactcagacctcagtaactcggtccttatcagcttgttgctagtcattttcttcattggtttctccctctgcttcagctctaacagaagggacaggttcctcttatcggacagtaacccggactttgggctttgagatgtcatgaatggtatcatcttcatgaaagatcacatcccggcttctcactatcttcttattgattggatcccaaagtctgaaaccaaactcggtttttggtgcttcgagataaatgaatttcttcatctttgcatcaaactttgccctttcatctttaaggatatgtacaaaagctcgacatccaaataccttcagatgatcataggttgctttccgacctgtccagacttcttcagggatttctccttcagtatagatgaggtcaagaatatgcctgcgtcgtctgggttgatccggtctcacaaacgaaacctgatgctgctttccagctaaacagtgcgtgcaactctctagcacttggcctttcaactcggtcaatagctctttcttcttcaaaatctggagctttttctcactcatgtggctgagacgtttgtacaacatctccaagctaggtccaccacggacaaaattggcttctccatcatttatctttccttgcattacatacaaggatccttccttcttacctctagccatcaccaagtttcccttggctaatttccatctacaacttccaaaatagtttactaacccagcatcatctagtttgccaactgagattaggtttaatcacatattatgtacatgccttacatctttcaacacaagtcagcactcgacatccgtggtcagggttacatcaccgacaccaacgattttgctagtcacctgattttccatcttcacaacttcaaagtcgccacttctgtatgatgagaaaaaacttttgtgaggagtaacatgaaaagaggcacctgagtcaacaatccaggcacaatcatcataggcaacattcaaaaaattatcttctccgagtagaaatatctcggcttcaacattggcaaccactgcagtggtgttcttgacttctttcttcttcggaactatttgatctgacttcacaaagtcattatgttcatctttctacagagtccaacaatcagtcttcttgtgttcgggcttccatcatcagttttcctttaggagacagattgctcaatgtcactaccagagtatcccatctttctggcaatgaactcagtagcaataaagcctgcatctcgtcatcaatcttcatattggctctggacaactgattcacaatacctttgtaggtgttaaggtgttcaatcatgctcatgccatccatatattccatcttcacaagtcggcgaaccatgtgtgctttgttcctgggaatcttcttctgaatcatggattccagcttgttccacaactcgtacacgtttgtgaacttggacacgtgttcaaaaagacttttgtcaatatatttcatgatcgtggcaaccaccttacgactcaggatctcccactccttgtcggttttgccagccggtctttcatcaaggacaatgggctcatacagatatttgcagtagagatggtcctccatcatcggtctccaataagtgaagttgttcgcagttagcttgaacgtatctccgtcatgagtaatgccaccgatctccatcttgtctatttcagaacccgtcgaacacaggctctgataccattgatgggtcaagaggaaccctcaaatcgattgcggaagcgaaacaataaaatgcaagaagagagagatagagaagaacacagtcaattcgtttaacatgggaaaaccttctcaatgtgaagaagtaaaaacccacaggacactgttccaaaatcaaacttccattataatataatggttacaagagtcaaacttccctagcctttcactagagatactatcaagcatcaccgagtatggtggtattcaaacttctctaaagagatcacactcaaacatctctctagagatctgttaaatgcaaagcacaaggcttgctcaaacctgttctcaagaatgttacttcaagctctcaaaatctgtcccctcaatttttcaatatgtcaatctaaaatctctctctctgccacctccaccttcaattaaggtatttatagtggtggagtaggtttagggttttagaaccctcaatgggtctaggccagcattggagtaggaagcccaatccaacacgtgtatgtcctcaaaattgtcttcatttctttcttttatgagcattatgtttttccttttgttattctgcagattggggtcatttctgatggtgaattgcttaatttactggacttggctttatcaactgacacttcaaatacagttataagaggctgggatcttgttaggacaaggatagatcttatacaacttatatcacagttggcaaatcttattatgaacattcttgtcgggaatgtaaacttcgtgattatgaaataagaacaagattttgtaatagatactcttgtaagtgttttaaaatatgttatatcctatttagctttgagcatattagccctttttgagtttgcagcctatacttgtgtctgcttttttcttatttctgttgtctgaactttgttattctatatatcatagcggaagcaaacctgtagaaactaagtcatgcatcaatgatactgtctgaaacagagaagcagttaagaattgaaggttgactaatataatattgtctacttgctttagatgtatccttatttcttagtatttgaaattatactcatctttgatatcaatggaaatcaagccttttttttatttactactatcttctgtgactcttccaccggcttgtcttgatcagagtttccttttttgtacactaaaatggcaggacagatggaatctggaaaaatggccattgttattgttgtggcaagaggaattgggcaatttgttgttcaggtacttcataaatcacatgccacttttctcaaccatatatatgcttgtctttttgtttccaagaactatttgttgtaacaaattgattgtttcttgatattttgtagttgtaagcaaacttgttaaaactaaccaatattttgcaaaaaataaatcatcataatttgtatcttttactctattttttcaaggtgttctatatttattattattattatttagtttaatttctatgtgtaacaccccgtgtgcacccggtgtgttatcaccaaaaatactagtgtcacgctaacagcgttaactaggcgcggcgcgaaagcgatagaatcgtttttctcgattacactatgcatgaaatataaaacacatcacacaaaacaacctcaaacccctgttgatccagataaaactaacatacaaaaacacaaaacataggcagatacataaacatctaaacagaggaaatcaggaggaatatataacaacctcatctgtacatatacatgctcaaaaacaagaccagatttggtcatacatcattatatgtacagtacaacggtgtacactcacaccctatcctttaacagatacaagacagagatcaaaactcttccaatcttcatctgcagcccatgaccatctccagcactctcagctagagcctcctgccctgtggttgctcctctcctcaggaagcacctgaaaaccacaacccacaacaggggtgagataaacatctcagtaagctcagggttctgggagaatcctccctcactctagttacccccaaacatacacacagatatacaacataataaacctaggacatggtcctggctatcactcattcccaactctctgggtattcaactgcatgctattactatcagaggtctcacacctcatattggctctcaatccatctcaactcatctcatagagccatgccatcattctggcatccatatactacactggctcttacatacgtctctcagaggtactatcacataagtgtcaatatatctgcaagagactctaggctctcatctcctcgagaaaactctctctagagatacaacatatctgcaagctgcctggtcccgccaagactttcacacataatcaatatccatgtgattccgatggttatcgccatctatcactgatccatgtgatttcgatggttatcgccatctatcactgatccatgtgattccgatggttatcgccatctatcactgatccatgtgattccgatgattatcgccatctatcactgatccatgtgattccgatgattatcgccatctatcattgatccatgtgattccgatggttatcgccatctatcactgatccatgtgattccgatgattatcgccatctatcactgatccatgtgattctgatggttatcgccatctatcactgatccatgtgattccgatgattatcgccatctatcactgatcctcatcctgcggaggcttcatctagatatataggccacatctccacccacggaggatcatctatatactaggaacatctcatggcaggacatcattatatctatcaaaggtcgtccgaatatataggtacaaccacgtctggaggactcctatataacggtacatctctgtaatgaggctcgtccgaatatataggtacaaccacgtctggaggactcctatataacgggtacatctcatgccctatctcatacaatcgcctgaggaggctacatctgtggatataggaacatctccatactaggaggctacctctataccacaggaaacatctcatgtcaggccttactcaaaagtgcctggggaatctctccactcaggacttcacaaacaatgcctgaggaatctctcatctcaggacttcacaaacaatgcctgaggaatatctcgtctcaggactttacaaacaatgcctaaggaatatctcgtctcaggacttcacaaacaatgcctgaggaatatctcgtctcaggacttcacaaacaatgcctgaggaatctttcatcccaggacttccatcgtctctgcctaaggaaacatccatccttaggacattaggcggagagcagtggcacctcccaaggaatctcagctattccagggagtcctcaaactctacctctggctagggaacctcaactagcccgatactagtccagtatcctgtaggttccaatcacagatcattctctgatctgcatatcatcacagaacactcacaccatctcggtgtctatcctggggttcatcatacatacatatctttcagaacggactgagtttaactccaagtaccgttcatccagcccttcggctcacatcatatatctatcatcaaataacggccaccctggccttcctcacctcagcatgcacaatcatatatgtatacatataaacaagcatggcatgcaataatcacctcacttgggtgataaacaagagatagggaataaccccagaacgatgagcttacctggcaagccgtgcctgcacctccagcctctggaacaatggtctgctcctctgacatatcgtgtcaagccctaacaaggcaaccaaacacatatcacagaccattcaggcacataacatatctaagctcatcagacagtcctcaactgtctctgagaaaggaacctcagtcctttctatcaactcaggtcctcaacctaaggtttctcaggctcatcctctgtaagcctatccatagacccttcagtggtctatctcagctacatccatgacctcagagtcaccacagactcattgcagccccattcctcaatttctctggaatggtctcagcctcatccaaggctccattccattagcctctcaggctcaacataagcatagacaaggctctggcatatccaaatacattcacaagtggccattacacaggccacacaagcaacacagagccaaaaaccaaagtcatcagaatcaaaaactgaaagctaatccttcatttattcctcgctctgaacacatctctcaacaggaccctgggctaatcctagccccagcacaaacgggtcactattcataaaacccctcagatccaaaatcaaacggagaaatttatgtttcttacctcagtggcgactccaaaagcctcaggacagcttcctctagcttctatgtcctaatcacgctgtggttctgcgccaagctcaagttctctgagcttttcctctgaggttcctcttctcacttaaaatgggggtttcgaggaaaaggatgaaggatttcagcttcctaatcggttcaatcacagttacaggtcgcgggtaagtgtttagggtcacaaaactggagtttacagagcttgggagtccttcaatggcggaaaaagctttggggaaggagagaggaaggttttcccttccattttcgcgttttgggcctttttataggccctgtcgtgcagcccacgctccaggcgtgacactccagtgaaaatcaactttctggagcacttcccacgctccaggcgtggcctcccacgctccaggcgtggcatgcagaatttagatatgtacccccggtagtacataggcttgttggcgcagtaccttctgttctgcttaatctctgtgatgaatctccttgctgatcgcgcggggtctggcgtcaatcgcgccatgccttagggttatcacactatgtattgtgtaaaaaaattaaactatttttttaacaatacaaaccgtaaggtttgaatttagaattccatgcaaaccatccaatgcaaacaacaataagatcaattataatgagtttaaatattgtatataccattagtgtatatttcatccactattttataaatgatctatggctacgcaacatgaatcacggagttgactagttggggtattgtacttttcagagtattgatttttatctctaaagtgagcaatgacatgtaacgaaagactttctttgagagtctctttgtatttaatgtattaggaatcatgtcaattctatttgatttataaaacaatgtttattaaaatagatgagaagttattaacacgtatatgaaattataagattgagtcacttttggtctttatatattaaaattatattagattctgagtaattggatccaatgaattattttgtggaaataaatttttttcaacacttttaagagaaatgaagctcttaaccatttgaataggcattggttaaaatgttagtctagcaatattgctaatataaatattttttgggctaactatcatgaaaatgtcatacaactaccgtaaattttagaactaatatgacaaacgttccaaataactgtacaataacaaatgaaaaaaaagaaaaagaaaacgaacattaaaaatagcaagcatatcttattgctaaatcagtggtacagggccatgttactaatagaaaatagctggtgcattgttatatttttttttttgaaaaaaaaaatgttgactctaattttgtgcaataattgctttcgcttcacaccatataatgtagaaaacatgcacacatagtcattcatattagctaatgctagtcatgcatatatatacatatatttatatatttacaaatattatatgtgtaactgtgaaatttaattgaaaatcatatgatatggtcgcaagtatatagttttagaatctaaactcaaaacatttctcttaaaaaaaaactcaaaacattaaataattttttagtataatactattaagaaacatagaaaatagtttcacacaattaaacataaatttaagaatatttttatatataaggaagtactttttatttttccttataattacaaatatcatcactatatctttaggcttagtattctcacaatgtttgcttattttaggttcattttctcatgcttttatttattctggacatcctgcagtttgtgtggcgttgtaattgaagcactcaagatctataaatgtgttctttttggatatggagcatgactaatcggtgggtaattttaagtttgtggttgatatataaatgcatgagaaaatgaggaaacacttcctatagttcatattgcagtatgtttaagtttaatagttctatattattattattattattatattgttttagcatttattaattatttttttattattattggtaagaaatatctcacaaatggtgctgtaatttatgtgaggccaccactgatcattcattattttaatttaaaaaaatacattctaagacaaattttctgaaaacaatcttagaatcctaaatgttttaaatatttttattaaaaaaagatattttaagacggttttttagaaaatcgtctaagaatccttatttttttaatttctttttaaaaaaatacattttaagacaattttctcataaaaacaatcttagaatgatgaatttttaaagacagtttgtcacaaacctgatgtcgaatctttcattctaagatgattaaggaaccgtcatgaaaagtgttgacttttcacgacgttgacttcaaagacggttaaaaaattgtcgttaaatatgtcaaagaatcgttgttgaagatgttttttctaatggtgttggtgtacatgtgatgtattaagatatatatatatatatatatatatatatatatatatatatatttgtttattatatgttggatatataatagtagattaacttttttccaagtattgaaagattatacaaatatagattaaatatgtgaattattataagatgttaaggtaatctttattagatgaacatgttttcaggagctttgaagatgaaaactattgtcttcaacattgttatataaattgatgactttggtataattgagtatatcaaatgttaaaatcatgaaaatgtgtccaattaaatgttaatgagttcattcattttaagtgaaattatattttgtataatttataaaataattaggctcgacacttttcatttaagtgtcagttgttcacaaacattgaattaatatctcacatttttttacgcgaatatttattaaaatttaaattgatccataattcattgttggtattgatttgtgaaatatcacatatattgacatgtgttaattttgattggtgatttctgttgaccaccaagacacgaatgcttggcttggatcgtttccggattgtaatcttcaagactccatgaattagggcttgaaattcaaatagaaaaatggagaagattaaggaatgatttagaatgacgccacgatccccaattggaacgataagtcgaaggaggattcgccacaaaggaaagctcccttgataagaatcaatttggtctcaatcaagaaccaacaagaggctaagctctcaatttaagcaaaagctcaatttcattaatctcaaagttaaccaaaaatagcaaagtctgagtatttatagggctagacctctaataaacccctaaaaacgttggtgcaggcctatttacggaaatataaaagcccaatacatgaaaacatcaaaaaggaagctgcagtaccatttttaatgaaaataatcgattaaaacgaagcgtaatcgattaaaacagagcgttctgcactgtgtaatcgattacagcaatgtcgtaatcgattacaacagacagataatcgattacagcaacgaaataatcgattaaaacagacagacagacagacagacagaaaaatagactgacagacagacagcatttgtattttaatcgattacagacatatttaatcgattaaaacagacagcaaatgcttattacaacagaaaagacttttttgatgtgttttcattgaatttggtgtgtctcttcatgcttgtccacaagatatacggcattttttatgtggttttgaagggcttgagttctagctcttgtcatgggtccttcaaagctcaccaaaggaagtgcttcaagctctccttctagacctttggcttgtaatggacccccatcatcatgatccttagatagtcctctatcatcccctccttcttgaaaataatccgtcctcggatttgcattcaaaacacctacatcacaaggagaaagatcagtgacattaaaagtagaactcactccatactcacttggcaagtctatcttgtaggcattgtcattaatcctctcaaggatcttgaaaggtccatcacccctcggttggagtttagatttcctttgggaaggaaacctatccttccttagatgcaaccaaacccaatcactgggatcaaataccaatgtctttctccccttgttggccaatcgtgaatattgctccaacttccactcaattggatttcccacccttccatggaaattcctaacaaaagaagctctaaagagcccatgtatactcaaaatagaagaatcattaggtaaggagattaaatcaataggacataatgtgttaaaaccataaaatacctcaaaaggagaaaagtaagtggtagatttggttaccttatcatcaagtctaggattaggatgtggatacttgacggtgatgttgttggtctcttccgaattaggcatatatgcagccctattaggaattgaagctcccgaaacaagaacaaattgattctcacttccttttaaaggaggcaagctatggggtatgtcttgtggaatgacatcttcaaactcctttaaaagtgtatcaaaacttggaggcaagtcaaagggactagaagacaagcacaaataattgggaatgagtaaatacatttgttgtctagctagcatcactctttttaccgccataggtttgatgaacaaacccggttttaccactaattgtttttcactctttttttctattttcttggattctctcttatcaatctttttgccatctttttctttttggattttctttttcaaaggactcttttcttctttaatgttcttttctttttctttctttaatttcatttttatttgatcctcacacacctcacttggagacaaaggtgagagaactacctttttacctttatgaaggaaagagtatcgattgatgaccccattgtgtaccacatctctatcatattgccaaggtctaccaagcaacacatggccggcttccatgggaacaatatcacaaagcacttcatccacatatttgccaatggagaatgtaagcaacacttgtttatccaccaccaactcaccattgtcactcaaccattgcaatttataaggtttagggtgagggatagtttttaaaccaagcatatccactaacctagtgcttgcaacattggtacaacttcctccatcaatgattagagaacaaacctttccactcaccaagcatctagaatggaaaatgttttctctttgtgtatcatctctatctttgcacaagctacccatgagtcgtcttaccatcaaaagatctccctcttccggtttaagaaaacaatcatcctcaccttcactagtggaactatgggaactcctagaggattcactatctacctctccattttctaacacaatcattgtccttttgtttggacattgggatgcgatatgacccttacccaagcatttaaaacatttaattgaactagatttattagaaggagaatgagtagtaggattagaattacctcttgaagactttttttcaaaatgttgggaagaagaaccctccttcttgggattgtccttatccttccaagatgaatgaccatatgaagactttttgtaggcttgttttctcttcaattgttgctccactttcatagctctatgtataagttcatccatggtgttgtaagtttgaagctccacaacatcttgaatgtccctattcaagccattcaaaaatctagccattgtagcctcattagtctcctcaatgtttgctctcaccaaagaaatctccatctccttgtaataatcatcaacacatctatttccttgatatagtctttgtaatttgttatgcaaatcccttatgtattgaggtgggacaaatctctccctcatgattcctttcattgtcatccatgtgtgtccggtctatgtctcctcaatcttcctctttccatttgcacttgattccaccaagccatggcatacccttcaaattctaagctagccaacttcattttcttttcttcactaaaattgtgacaatcaaaaacttggtcaacttttatctcccaatcaaggtaagcctccggatcattagtacctagaaacttgggaagtttgaatttcacatcttccattccatccctattcctcctaggcctataccttctaccatcatcatagccatcatcactcccttgagaagaatgaggtgacctatgatatctccttctctccatgtcatctattcttccactcaactcataattacttctttgtatctcatcaaaacgtgcgttcatccttctttcaacatttctttgcaaccgatccatttgcttagccaatgaagtcattagcatagcggttctaggtgaaggtggatcactatcaccatcggacaccattgctacaagaacaagaggagtaaaacaaaaaaataatgtaccttaccactcactaagtgtttacactcgtcgacactcgtgtttcacacttgaaagactttttctctaatgttcactcttgtctttttccactctctaactctttgtcaactcttgaaatttaaccaaagattctagttcaaggaatatccaaagtgaaagatgaaacaaatccaagctcaacttaagatgtcaaggaagaaagaaaactctaagacaaaaccttggaatttagaagacaagcaataaaagctcaacaagaaaagcacaactcaaaaggaaagccaaggaaagacaattatagaaatagaagatgtaaaagaaagtgctattaaacaataacaaacatacactaagagagggctaacaataatttttttttcagtttttttttacttttgggtcctcatgtcttttgatattttcattttgaccccacaatactttttaataattgcatattggtccttcataaattatcttttaggacctgaacttttgatatttgcaaaaacggcccaaaactctctagacagaattttatgaatcaaactcagaaaatttccagcaatgctatgagtttcatgaagaacacgaagaacacgaagaacaacccatattcaaaacaactccaaattcaacaaaaccataggggaaatgaagacaattgtaagataaactcaaaaatcacacaagaaacacataaagaacaacaaacaaccaagaatcatgattttcaattttcattttccggaaaaaaaaaataaaaacgaaaatgcaaataacatagatagaaatttttacgaaatactttccggaatcaagctctgattaccaaatgatgaccaccaagacacgaatgcttggcttggatcgtttccggattgtaatcttcaagactccatgaattagggcttgaaattcaaatagaaaaatggagaagattaaggaatgatttagaatgacgccacgatccccaattggaactataagtcgaaggaggattcgccacaaaggaaagctcccttgataagaatcaatttggtctcaatcaagaaccaacaagaggctaagctctcaatttaagcaaaagctcaatttcattaatctcaaagttaaccaaaaatagcaaagtctgagtatttatagggctagacctctaataaacccctaaaaacgttggtgcaggcctatttacggaaatataaaagcccagtacatgaaaacatcaaaaaggaagctgcagtaccatttttaatgaaaataatcgattaaaacgaagcgtaatcgattaaaacagagcgttctgcactgtgtaatcgattacagcaatgtcgtaatcgattacaacagacagataatcgattacagcaacgaaataatcgattaaaacagacagacagacagacagaaaaacagactgacagacaaacagcatttgtattttaatcgattacagacatatttaatcgattaaaacagacagcaaatgcttattacaacagaaaagacttttttgatgtgttttcattgaatttggtgtgcctcttcatgcttgtccacaagatatacgacattttttatgtggttttgaagggcttgagttctagctcttgtcatgggtccttcaaagctcaccaaaggaagtgcttcaagctctccttctagacctttggcttgtaatgaacccccatcatcatgatccttagatagtcctctatcaatttcttttcacgattgttattataatatatgattgcaatatatgaagatatattgtagtatacaatttataggattgtacaaaattttttattattgtaataaaagtcaataatatatgatattatgtcgacaatatgatatatacttcagattatatacttctgcatatagatatttgacttattgattagattgttatatattattgataatatatgtaagttttttattatattattatatacatataatatagatcggatatattatatgattgcaatatataaagatatgttgtagtatataaattataggattgtaccaagattttgattataatgataaaagttaaaaatatgtgatattatatatcattttgattattattttttgcatgaagatatttgatttattgattagaaacaaaaaaaaggttttgttttaaatatgctaataattgacatatagaaaaatgttttaaatttaaatatattaataactagcatatagaaacaaaaaatgaattttgtttttaaatttaaaccttacttagaaacaagaaagaatgcatgtgagtttttttttcctggattgctagaaaaagaagtttcatacgtgtgttataagaagagccttagattgaacactaaaaaacacaattaccttttttcttattatacggaagcaccaattttttttttaaaaaaaaatctctttattccgctggtcaaagaagttgcctacaaaagttaattctattccaaacaactaacatagaaataagatttcaaattaaaatgatttaattcaagttttatcttgtcaatgactataaaaaatcttattttaggagcaaaattttgtttctccacatgttgtttacagtctttatgacaatacatatgatgatatgtgttttattatatggtgatatattatttagtttattttatatattaaattgtttaattgcatggaatgaccagaatatcaagaaacttgtggttttaaaaacaaattggagcatatgatgcaaactgttttgatttattttattacaaggaacgacttgactaacaagagacttgtaatttgaaaataaattggagcatacgatgcaaactattttgatttattttatttaaggaacgacttgactaacaagagacttctaaattaaaaaataaattggagcatgtgatgaaaattatttttattacaaggaatgacttgacaactaggagacttatagtttataataaaagcatttgatgcaagttatttttttaattaataataaggaatgatctgacaaccaagggacatataattaattaatacaacatgagatgtggattttgaaattatttttatactaaacatcggaactacccgaggagtattaaatttaatttgtagataccaataggattgacttgacaaccaaatacttatttggtataattatcttttcaaagtgtatgtgatacatcatgtcttagaaaaatatatgtgatatgttatgtctcagaatatgtttgagaagcaacttaacaaccaagtaactcattcatagttttaagaaatttttcagttaagaaatattgcaacaaaattggttggatccaattatgaagattagtatcattacctaagaatttttctcatgcgtaagatgtttaatatgctaattgactatgagaatcaagttacctatgatcttttagtaagtttatgtgcatatatgctttagaagcagtaacttatttgtcaaataaaatttctacaaaatcagtatctacaactccttatgtgatgtggaaagggctagaatgaatctcaaacatagtaaggtttgagattgtcccacttacattaagatattgcaaatagaaaaacttaaggcaatgtctgagaaatgtagattcattgggtatccaaaaaaaattatgggatattgtttccaccaaccttcagaccataaagtgtttgtgacaagagaagttattttttagaaaggaaattccttgtaggagaaattcatggtaaagaaattgagcttgatgaaatttgtaacaccccgtatgcacccggtgtattatcattatcattatatcagattagcgcttaatcacttaattaaaaacatactttgcagaagcataaaatcaaaaatcatatttcttgattacattatgtatggaatatcaaagcatctcatcacaaagcaacacaagcccctgttgatccagatcatacaaccataaccataggcaaataatataaatatctcaaagatataaacagaaggaaacatcatcatttacataacataagcaggttatgtacaaaatacatcatctgacactcaaagtgtctgtacaaaagaataagcatccgagtgcttttgatcccaaggatcctttctcacacgagggcatgcatacatagacatgtataaaacaaagactacatgtgcacacacatgtcttccctctacaggggtacaaaacatcaaaaactaagccgagctccaagctctccactgctgcctcacagccaagcaggtaccgtctctactggggcctcctgccctgagaccgctcctctctaccagaagcatcacctgaaatataacataagccccacacggggtgagataaacatctcagtaagctcagggtccttggaggcatttcctccaccttggctcactcaccatgacacaagtcatcagggtatcacaacaaactggtctctcggccctcataacaatacaagcaagctatcttgctctatgtacagcggaccgcgtcaacgccgacctcagtgtgaaaccgaaattcacacccgtgccatcccattgggagctacctcttacgcatggacgcacgtatatggtacctccaagaataggcaatcaaccgcgacgagacacacctatctcttggtcttaggggatcatcatcaccccgggatccaatcaaccatgagcaaaccaaactaggaggtgccctctactcctagggaggtccatatatatctaactggccagaagatctaaataacaggctccatacatgtttcaagcacagatacaagcatatatcatcatgagtatgcaacaaccaataatgcatgtatcatgaatgtaaccactactccctcggagtatggtggaacacaagcaagtgggaaacatccccaagggaccaggaacttacctggcaaagccgagctctgcggttcttcccttgcttcgtggcctacgccactgacacccgtggtgtcacgccctaaacaaggcatacaaacatgtatcaaacatccacacagccatacaaggcatacaagcataacacagttctcaatcgctttagtgaaaggaatcacaatcctttccaaaaccacaaggtcgtctaacctaaggttcatcaaggctcaacactcaaagccatatcatagaccctcggtggtctacctcatgcccacacggcacttgagtcatcacaagactcaatcactactagaaaaaacgcttttaacatcggttcttttggacattcgacatcgatttttaaccgatgttgaaagtacaaatgttaacatcggttttcgaaaaccgatgctaacataattacacaacatcagttttcttaaataaccaatgtcaaatagtaagaaataatgaaagaagaatttaaaatatgcatattcaacatcggttcttttgaaaaaatcgatgttaaatttatatatcgacatcggttttcttataaaccgatgtagaaaatgatatttctacatcggttctatcaaaaaccgatgtagaaatatccttttctacatcggttttgactcagaaaccgatgttgtatattccctttctgcatcatttgtcacataaccgatttagaatatcattttttaaaaaaatatggcctattctctttagttctattcttgtaattttaaaagatacaaaagctacaaatggagttcaagcttatatgaaattagaacaaaatccagttcacaataattaataacatattagataaaaatgccaatattcattaaaagtagaaaagttacatctaaaaggtatggagataacaaacatgacattcaaagaaaaatataaactataataataataataataataataataataataataataataataataataatagtaaaggtcaataaccaatgacatacttgattaaacacaagaatttacatcaagtattaaataatttgaatttactggcttacctgtatttgttcattatttctaactataatgtcctctatcaactggctcaagaggcataggagtgcaccatgattatagcaaatttgatctgcaaaaacctctgataatcttaataattcagaacttactataaaagataagaaactctaaaatattaacaagtcaatttattctcaacatgaacaaatttaaggacatggcatggcaacgaatttcaaagtaatcatgaaaacaagaagtgtctttcaattcttggaagcaaattttagagtaatcatggggacaaaaatatcaatattaacttataaggtaaaaatattcaatgcaattttataatagaatgatttctaattaattcataatataacaacttcaatgctaagaacacctatctattgactgggtatctgtaataggatcctatctcagattttatcatttaaaacaagatttattatgttattaaaaaaagaagttttaagaatttttatttatttttaccttgacaaggttgtttccttttaataagaaaattatttaatttcttaatgaagatgcgaataaataacgcataaggtgtaacacccaaataatttatgcaagctatagttatcatttatcaccccaagttatcacaaatgaaactcaactaacaaaaattaactattaaagattaatacttgtggataaaaaaaaagtgacactcgaacaacttaaaaattaccatgaacatgaaatgcaacaatttatgttcactcttttactagcacgtgcagtatttttcatagttaatctattaatgatatttttttaagaatccacaataaaccagtgcattttttaatcatctttgggcaaaccttttcccacctaccaatacgcctagagccaatttttgcacctagagccttatagctaatttttaggcataagatgtgttttcgttcattgtagaaaatagggactaaaataatataaattattttattcctatatttttttttaattttaatgcttgtaagttgatatttttttaattttggttaaccgtaagatttttttttcttatttttaattcttgtaagtttatatattgttttaatgttggttcgtgtaagattttaatttttttttcatatataattcatataagtttgttcttgcatggaccaaattttttaattttttttataaaaactaaaagtaagcaaaatattttataaagactaaaattaaaaaaaaaatacttacaaaagctaaaattaaaaaaaaaacttacataaattaaaaaaaataactaacttaaaagaaaccataaacatatatttaagtcctactttaacttatttgtaatttttcacggtatgaaagaatacaggaaagaatacaggattttatcagtaataaggcagcaaatctaaacatcttatatttagctagaaaaatagtttcatacgtaatattaaaaaagaaaaaaggaaccgactttcagttgtaagggtttggtctttgatgcaaagagtctcaaggtcagggcaatccaatccaatcctgttaagaacctgaatcattagaagaatcttatcagatgtttgacaaatggtatggcaaaaatgaattttaatatttaagaaatgaaacttaagtcatgtacaggtcagaatgaagctctatattatttgaaaaatgaaaatcaggtaatcactttgttaacattaattggccttattcaaaaggcagtgtaaatcaaacaatggatatggatgtccagaatgggtaggcttgaaaaagcaggaaacaaaatagaattttatccaccgaaacaacttttaaaatgacattaagcattgctaagtgcagttaggaaaatttcacaaagccaatgcatgagattccacatattccaaaggcaaatcacactaatccacagcaagtgaaaaaattgaaacaagcagaaaaaatgcaacaaaaggaagcataggataataaaagcaaaagaggcacataattaaaaactatcagatgctgacaatattggactgagctttcatagtttcaatatcacgttctaattgttgcttccaatcagaaagtaaagcctcgtcctgtacaagttgatttaaaatggatacatgaactgaatatagcaatggaataaatttcatattgaagttaatctaacatcaaacctgaggcagctgtattgtcactttgtttgggaaaagacgaccaagttgcttcattactttaggggtttctttgctccgatcatgcagtctaccaaagttatcctgaaaaaagaacaaataatagtggattgataattaactccttaaggaaccagaagcaaccaagctacaatttatatataacaatattaactatgatttagatctatctcaaagctatgaatagtgtgaaggtacaaaaaaaagacaagaactctaacttccatgctagaaatacacaagctttaaatcaaggtaagaagagcaatggcagtggttcttataccggaaaagcaagatcaagtagtgctgtctgattgctcccaaactcggtaaacagaaggctgccaggttgggtctggaaacataatcatgcagtcagtaaatacagcagcaaaagcattcctccaatcatgaggtcactacgatctaataacaagacagtaccttctccttctccaaagaaaaggaggttaagtttgccaacttcctaataaaaccttcttcttttttcctaactaatgtttggcaaagacagaacaaaattggcagagtacaaaaccaatttacttgttcagaacaaaatcactttggtcatgtagaaagaagatgagatatttaatgatattagcagatgacaacatcccaaatcccaaatccaagccaatatcattgcatcagaccaatcattaacggaatcacaattaaattttcaaactataactctataaaggatatttctgtaaacaacatcccaaatccaagccaatatcagtgcattagaccaatcattttcttcccgttttcccacaatccatatgcccattaacacaacttttcttatcaatattatagaaaaggataaagaatcatgtaattcctaactagtaaccaccttattttcagcagaaacaacctatctaaaattaaattttatgaaataaaagagcacacgcaaaaactaaatctagatcattacaagaccagttccaaccaacaaaaatcctgcaagcacacaacattctaaaccaatatcagtgcatccaaccaagatttctttgccagttttctcataatcgaaacacccctttgtaatactaacaataacaataagttctttggctatctagtgggacccccaaatattgctacaatttttggtctcttaaggcaactatgagactatttctcggttcagagtttagtcacttaaactctttgccatctccaataacaataacttaaagcttctttttattttaataggaataacttaaagtttatgacaagattaaagctcaaaacttcatatattttgcagccatataattttaagcagaaacaacttatttaaaactatcaattgtaagatgaaacatcctataccgttaaataattattaaatagccatatacacactataaatttcatttcattataagatgaaatgaatagtttaaacttcaaagtacctgatgtccgtgagaaagatgtccacatgaggaagatcaagtgccatgattctttcatgaagtttaagcaatgcagtgtaaacagggaaatttgtgggagaccttgacagaggctgcacgttcactgcaattaaggggtaacaatgacatatcaaaagacttaaacaaacacctaatacttttaatgaatctattgaacatcaggaaattataattcattggaataacaagatgccgcaaattcaataaaaccatttcaactttgagccatcaatatgttaaaatcgaaacttgaactcccaaaaatctaacctagaggcaacgtaattttcgtcctgagggaaccattctcaggtaacaataacatgattttgaataggtcatgtggcataccctgacatctttcttgttcatttcaaaagacacaatctgcttctttcctgcaaaaacaaaaataacaaaacagatcagagattgtgccaacacagagatgtggcattttcaaacttaaaagaaaagttttcatctttatctttgcaagcatacgtgacaaagtgaatgagagagaaaggggagaccttgttggggagcaaactacagaaaatccctgggtctgagcttctaatatgaaaaacgcataaaaaattggaaatttatatgagtggaaaagaacacaaatttatatgagtggagatttatatgctaaccttcagatttttagtgccgctgctgcgagatcgacggcaagaaagtgactgagagagagtcgcaacagggagagcgagaagacgagagagcgagagagtcgccgtcgggaaagcaagaggccgagaaagcgaggaagaacgagagaagagttagagtaaaagtttcagaaaaaaagggttttagggttttataaaagagccatgtaaatttaaaagtccacaacatcagttttcttccaaaaaccgatgttgctggttttgattttctgatggtaacatcggttttcaaaaaaccgatgtattatatcttacagtaacatcggttcctcataaaaccgatgtaaacaacgttctttatttacaaaaatgccatcgcgttttcgttaacatcgattttatgaagaaccgatgttaaattgacgatgttaaaaggcctttttctagtagtgtttaatgcaagccaacatcaagagctcaaagctctacataagccccaaggctcaaaggctcacacatggcttgaacgattctttcacacacaaaacaccattctaatatcctcccaaggccatcaaagccacaaaccaaggctcttgcatgtcaaaacacagccaagcaactcagcatatcactatacatgcatcatatagagccaagaaatcaaatttcaccaaactcacatttaagagctaatcctacatcctcacaacattttaaacacatgattccaaaggatccaaggctactactagctctatcacaagtgggtcactattcacccaaaaccccaactcacaaatcaagcggtgaatcttgagtttcttacctcaaagatggtaagaaggcccaaggacgactccccgtagcttggataaccacaaatcgtcgccgttcctcgctaaactcaagttctacaaacttcccttgagaaagggattctttgatttgggggttttcaaggagaaatgaggaaggattcaagctctacaagtgttttccatcatgaatggtgtttacggaagtgtttttggtgaactatagagaaggaatgaagcttggagcttcaacaatggaggtggggtactggaggaagaagaaggaaatgttttctctcccaaaatcgcgaccccagccttttatagtggtcctgtcagagctgtcgcgctgatcgagccagctgcaagtgaccacgacgccatccgcgccaaccccgcgccaacctccagaacctctggcgccaagagcgccaacatccagggactatggtgcctccagtgccagaacccgcgccaagagcaccaatatccagagactctggcgctaaccgcgccacaatgacgccactcgtgccaactgcaaagaagaacatgtattctgggtggtctggcgccacccgcgccagcctggtgccccaggcgtcaaccaccaggacctttggcgctgggatgccactcccgcgccaagagcgcggcactctagagactgtggcgccaggagcgccacacctcagaaccatggcgctgatagcgccaccctggcgccaagagcgccacagttatgcagaaggattctgcagaaaaattgtacagaatccaacgctgttcgcgcccaaaactcgcgccgtacgcactggcactcagggttattataaaattcaattaaccaatgaaaaaagttaggactatgagctggaaaatgagatacctttctctaatgttctaaagttagcataaaggtcatcacatccaacaattgtggttcaagagccagttatagttcaagatcaggttcatgaagcaatcttagagtcaattcaacaacctatgaacccaatgcatgagccttttagaagatctacttgagtgcatcatgcacatgatagattaaacttgatggtcttagatgacacatcaaatgaggtttatcatgatgatgatgattcaagaagctatgaagagactatacgaagcttagattgtaagaaatggcaagaagcttcaaaggatataaaaccaattggttgttaaaccaattggaatcaatgaagatcaacaaagtatagactttagttgaagcttcaaaggatataaaaccaattggttgtaaatgcgtttacaagaaaaaggattggagcagatagaaaggtcgagacctactaagcttgccttgttgccaaaggatattgtcaaaagaaatgtatatattatgacgaaacttttatcccgtggcaatgctataatcaatacagatttttcgtgctatagtagcatactatgatcatgaaacatgaaatggatgtgacaaatgactttccttaatgatgagttaaaaaaggatgtttatatgatacaactcgagggattcacacccttgtctaatcataataaagtctactgttggtttcagaggagctatttgaataatggaataggatcaagctttggttttgagctttcaacatgcattggatgccttgaagaatgatttgtgttaaatgtgtaagaaagaagcaattctggtgattcaagtgcattgcattgcattcatatcattcattaattcaattagcttgagtaataaaaatcacaaggctttagtaaaatgatcaagtgtttgatttaaatcaaaggtttttggaaaaatgtttttgtactgaattaatcgattacattaaaagtataatcgattattttgttcttggtttattttggaaaagtttttaagaacaatgtaatcgattacctatcggaataatcgattatttgaccttcgttttcatataaactaccttgatgaacactttaatcgattaccaataggtagtaatcgattacattgctatacatgatttcaagcactgctggaagaatcgattaccaaagagtagtaatcgattacacaggctaaactaaaaaaaccatcttcctgtcttaatcggttatcaaattcagtaatcgattacattatatgtaaatgcacataagattcaatgcattaatcgattaccaaatatattaatcgattacatagttcaatatgatttctaaagcttcctggtttaatcgattaccagaatccataatcgattacacagtgtatttcaagtttatgaaacttcctgtcttaatcgattacaagatgaaataatcgattattttgttttttgctcatgttcagattcttgtagaacactttaatcgattatcagaatgatttaattgattacatgagtgaaataatcgattatatggcgcgtttaatcgattactgacagttacaaatgtttgttataaatagtcagcttgtttttataacttgatcaattcgtattctgagctaaaataagctttctaaacacgttctaagtgatttttctgggttctatgagttcttgctttcactaaaacatttatgagttattgagtgattctttaaagcaagaagatactttcaaaggttaaggaagaagatgttctgagattgtttttcatctttcaacctaatttgttcattcatgtgcatgtcattcactggatcatcaggtgttttctttccttaattgattggttgtaattttgcttacaaaatttgtgttgaattggctattgtaattttgattcttaaagcttgggactagagaaggattctctagcttaaagatcagagtagtgttctctggatctttctccttagatttctaatagggttttagatttctgttctttgtctagggttgataaaggggagattcttgtaaaagcttgtaagaatatttttataatagtggaactctaacctagtgttggttagaagaaactggatgtagcttcattatttgaagtgaaccagtataaattgcttgtgttattatttctattctcatcttattaattatctttaattctttgaatcatattcattgtacaacaatgttggttttgagctattgaattcttggactgagctatttgattgagtaaaagtttcttggttttaaaagtgataaagatcctgaaaactctgatttgaaattgttttaaaatgccaaagttcaaccaattcacccccctcttggttgttgtaaagtattcctattattttcatctacaagtttcaatgattcatttatggattgaaacaagtgtgtagaagtcggagcattcattttaacaagataattgaatgattcaatcttgttagctatgaagacgaactgtgagtacaaaaaggtcaatgggagcattacatttatatgtagatgacataaaataatacacaatgcaaggaagaaagatttgactactaatatattatccatgaaacatttgggagaaacaatcaacattttagaaataagatttattgagatagatctagaaggttgcttggtgtctcccaatctaggtacattgataccatcctaaagaggtttaacatggaaactccaaaagtcactatttgtcaataggaattgaagttactctcattagggaggattgtcctaaaactcacgaagagattgaatacataaccagagtactatatgctagcatagtggagttattgtatatgacatgatttttgcatgttctaatatcatttatgcattaggtgtaacaagttgatatcaagaaagtcttggtggggagcattgaaagtgggtaagaccattcttaagtacttaaaaagaactaagattacacctcatttatggagactcaaaatttaaaactaagtagtttggtgagcatgagttgaattagtaatgaaatacatgagtgattgactctagagcaagtgggagattgttagggataaaacactatagaaaaagggtatttctgacgacagaaatctgtcggtaacccataaaatccgtcggtaactgaatatgtccgacggacaaaaatctgttggtaaaatggtcgtagaaaattttaaccaacgaacttttgttgtccgtcagtaatttttgacaaaaatatccgtcggtaattcaccaaaaaaaagaagaagcataacacaaatatcaataattacattctcaagccgaatcagttaacagctatcaaaaagtaaattagcagagaaaatcacaacgttgaacaattttgcgatgaatcctcaccgagcaggccgtctaacatgttggaagatcggacttggtgacgtgactcaacgaacaatttgactcggtagctcgaaatgtgagattcgtcgatgacgaagccgcgttgcgtttgggccatagagagtaatagcacagagctgtagtggaaagaaagaggttgaggaagtgagagagagagagataagagaaaaaaaggaaaagagaggagaagatggaggaagagaaaaagaaagacagaggagagggatttggtgaagaaggcaacacggtgacggtgcaaaagcagagtgggatcaacttagagagggagaaggaagcctagaagagaaagagagagaaggaaggaagagattgagttggatgtatgtcgttcgtgagagagagactaagggtggaattttaaattcaaattgtaaaagagagataaagttggtggaggtgagcagaagtgctttaaaaaagtgcacagcaagctgaatttattgagaggctaacacgtcaaaaaaatagtttgacatataattcaaacattttccgatggaatatattccgtcggtaaaattcgtcactaactcaaacattttcgacggaatatattccataggtaaaatccgtcggtatttaaacatttcctacgaatttattccgtcggtaaaatctgtcagtaattcaaacatttttgacgaaatatattccgtgggaatattcctttggtaataacaatttttgttatagtgaaagtgtatgtccatgatctaatctatcatattatcaatttaagtaaataattattctttattttattatcatatttattgttttattaaattagagatttgttatcatgatagatattatgataatgagaaacaagttacttataattttattctaaattgttcttgatgtaaggattattataaataggatatcgataatccggatagatcaatatatatgtaatgatctttattggataaagatgaatgtatctcgtttactaaattgcatatagagatgatatacatgtggatgtcattattgaactgactcaattgagaatttttaaatgttaatattaccttcatatgtcaataggaagttccccaaaaaaatataatagttttctttgacaagattatcatagtaattaacaagttatttattatgttttaaattcggacacctaatgccttagaacactagttgaatgaatattatatatgattaaatacttgtacaattattgattaatcaagaaggagtccatcaattatatataatgagtttgagttctatgatagaattaaaaacttagacatgacaactgaatgaaacaagaaaatagatttttaattcattcattgattaaatgtgttagcttattagagtttgacaataatactacactctagaattaacctttagttgtaaatgatggaagaaaatattacattattcttctattggttcttgaaactaaaagatgttatttcatgttacccaagcattaaggagtgttattagacgtctacctggattagtaaattaattatgattaatttagtatcgatttagtattgaacctacggggtgacacacaaacgagtgttccaatctttgcaaaagaaaaataatttatttgataattaaattagagaacttaatttaatcaaatacatattttagttgaatattattatattctttactagtaccaagaatgtaattaatataaaaagaatattattttatagatgtgcaagttatccataaaataagaataatattatattattacatatcaaaattagatcatataattagttattgtaattaatcatgtgattaattattaatatctctgtcttatatagtgaagtttcttaagataaaagatatgagataattttcatttttataaagataaagagatataaaattattttaaataaaaaactaacctcatttattatctcgacgtgtcgaaacccacaaggcagaaaaaccagaaaaaaaaactaactctatttttctcttcccttttgagatcccgaaattttgaaacccacacagcgacattggaggttgaggtcgaggagggagaggcactgtaacggcgtttgtggtcgtggccgcgggcggggccggagccccaacggtcggagaattgtcactgttgttagaccacgaagcgacgacgatttgcgcgaggccgatgttgctgcagctgtggcacccttggtgcttagctggtgctggaagtcgggagggaagcggaggatgagggaggagatgtcgtgaaatgccgcatcggatcctgcggaggagtggaagctgtggcggcaaaggttgtcgaaggacggcgggggcggtgagaaatcaggattgaagcggcactctaaggtgactaaggccgcgctggtggcggtcgagccccaaagctttcccagcctcaaggaggccaccttgagaaggcatctagctctgaatttgattttgaaaagcggaacgcgtaaaataaacggtaccctttgttgctgccgatgctcttgtttctgcaatcattttgctttcttactttctcaaatcacaaaggtagtccctcatctttgaattttgaaatgctcaccttccatggagatgctggagacttcacagtgaaaccaagattgaggactagcttacatggaaaccttgttttctatctatgtctcggttctgtagcactctttggattaatattactaatttctttgcacaaaaaatattggtttgcttctttcttttagatttctattatcttccatttatttacttgaaccttgaaccattgaatgtgtttccttctttttgttatttgcaaattgattttacaattacttttattgctaacttccaaacttcagtaccctgccaaacttttaaatcattacaagttaatacacattattgtgtattggtcgctgaatagagtttacatataaagacaataatgtgttaatttctatattttaattgcaaattatggaagctcatattaaggttgaggaacagaagcagttatatgccctttataatatttttttcacttgatcccaatagtggaaaagagactataatgaaatacaaatctgtcttttgaattctcatatatctagaaatatttgtatggcatttgctagcttttttttaaccttgtcaagtatgtctttagattagctttgtttgaggaaataatcactttctttgccagcttcttgaggaatatttctagagaaattgattattttcccaaacaatcattagctggccaaacatgcaagagggttgagaggttggatccaatcaatataatctatcttccaatataagctcaatccttttacagacttatatgtggattttatgctcgtggcatggtttcaatttgttgataaaaaatttgttcccatgcaacaagatgattgtgtctgttgctattgctaatagctattgtatattcactgcagaactctcccttgttgtcacccatcgtagcaaaaaaagatgatgttgctggctctactggcagactgtccttaagagcacttgcattaattggagctggtttgtcatgtcttctcagtttttcaacaatggcaacagttgatgaagctgagcatggcctagcatgtgtccaagctatccatggcctcacaagggaattcttagttcatatgatcacgcttcgtaagtttggcttgaattttccctatattttcctatcttttgttcaacaatattgtttaccaaattagaaaataagataattttatccctgttgaattacatgtaaagatgtttattctattctctctaatttattaacctaattttatattttatcccatccttagatcagcaactcatccttcttttcccttgtcatttcatatgtctttgatcatttgtcctccattcatagtcaagatctaataaggccttcaatgacataaacgatgtcacattcattcaaatgccctcgatctgtgaggacaccattactgagagctatagtcaatgttatcttcctattcttttgacatatgtagtaaggaccaatttgattactcttgtgtctttggaggactaacatggtggtttactctatttattatacattgattgcatcgtaatttatctagccaaattgtttaatctctgatttttgccaaagaagcaatttcttgctttaaggacattagctgtggcaactggcaggattcataaaggatgactacatgttctgctgctatcatgtatttaaaccatatttcacacatgatatatatgttttgctgccaaattttaattggctgatttgctaaatataggttgctcaaattgctatgatttaattgtggttcataatattcccttatctctgtgctaaaaatatactaattattggttaatttagtctattaagattggtcaagtgtctacccaccctcttttatacatttaatgtacttataggcttgttatgtgtaagtagagtacggtattcttgttccaattagtattataattattaattgaagtttttccatcttatggattaggtcttagatttatttgaattttatttctttagtgttaaaatgcaaatgaattcatgatactcctcttgagatatggattttagaaatagacaagaaagaaagaaaagaaacatgcaagaaacaacatccatagtatgatcatgaatgagcatctattggccaaagatgttgtgctcactgcaagtgtaaagattaatgtacgttcaatagtattttccaaaaatcttatcataatttttaattagttgatcttgtaaaatctttatatataatgttaaactcttgatttaatatactacatctacatctttggtaacgtctgtttaattttatttcattataagtgcagtgaaatttttatgttaccattcactttgcttttaaaacaattattatatcttaattttaatttatttaacatggactttggttgcaaaggcttttggtcagtataggatatcctaccacaaaaagaaatttaaaaaattcaggattctaagacggtacttagaaaaacagtcttatgattctcaatttttttattatttttaaaaaaattgaagattctaagatgattttttgaaaaatcgtcttaaaaaataaattttctaaatcttcttagaatcttcaatttttttaaaattttaagacgatttttaaaaaattattttagaacgtttactttctgaaaaaatcattttaaaatttcaattttttaatttttaaattttaaaaaaaatgcattgtaagacggttttagatagaaccaatgtcgtaattgatatttaagacggtttggaaaatcgtcttgaaaagtattaacttttcatgacgacgatttcaaagccgattttcaaaccgtcgtagaatgagttaaataatcgacataaaaaacatttttttctagttactagcatgaaaaatttctcagaattttctcacgtcaagattaaagtatttagattggaattttgttttcgttttgtgtttagttttggttcatggggttctttatcgttgcttttctagaaaatgcataaacttggatctgaagtgtagcttcactgttatattatttacacgaaacattgatgcacatacaagtatatatatatatatatatatatatatatatatatatttggttttactttaaatgtataaacttggtttcgaatgcaacttcattgttctacgtaagtcagtggtgagaacattatttgaagcagagaattatttccattgactatatttctagaaaaaaggttacaaggaaaagtagaaaaagagggattcagttttgtcataggtaaaaaagaagagagaattgaaatttattaaaggaacctctaagtatactgactaactcaaattttacgtatttttccatatttcctcttcaccaactttgcttcttcacaatgttgatgatttatttgaaagtaattaaaagaaaaatttaaaaacataaaaaaaaatatgaaaaatcaaaatacaaaaaaatataatgtcatatagtctaaattacaatattgatattttatgtatattttgcttgtatgaatttggtcccttaagttacttttttttttttttgtcatttgatcttatataatgtgtttgttaaattaaattaatccttccatcaactttcgattctaacgacgtcaattttaactgccttgatatattttacaatttattgcgtattagtaagtttaccaagttaatatgataacttgttaaagcacaattttatccttcttaatttattatctttttgttattatttttatttttattttgtttcactatcacttttttttatcataataaaataaaatttgtccttaatttctcagcatggataattccatgtttgagttcaattcaaattataaaaaaagtagaactgagtgaaggtgaatattagaagtttaggttagatatattaaaaaaaagagttttctaatatttgaattctttaattatttaaattaattgaatttaaagtttaaattaaatttggtaagaaaattaaagtctcaagactcaactcattagcttatttataccttgattgtatttttattcattgatttatatatatatatattgtgattaatttaattagtatttaaaagatattttttattatagtcaaatttggttaattagggtaaaattatatttttacccttaatttactaaatttgactttaatgttcataattaacttattttgaatccaaattgttttttccccttcaaatatgatgtaattatatatttactatgactaaaattattaattgtttgaactatgatactaattcaatagggtgacaattactatttatgccccccaaactcctctctgtggcctttttcttagttctaattagttcgaactaccttagggattggggtcttggaagcttttatgtttttatttaaaaatattcacctagacttctcaattatccacccactttatccttaacaatattctctacaatgttattccttttctcgacactacccaatcttttcctttctccaaaatcaattttgcaccttgcgacacctacgggtacaacaaccaccggagggattcaaatcttcaaatctaagattagttaatgtacagtccaaaataggataatgacacgtggtcacctcataaatgtcaatgtacatgtggccaccttccatgccagccttgcctcattaatagacgcttattcagcctctagggtgtcagtctggacacaatgtccgggtttcttgtcaaggagcatggacgtcaaccctctacaaggatattcaaataggtgtaaccaccttatcttatcaaatctcgacaagttatctaataattgttacttatctacaagtaacaatatatctacaaggtaaatattatctattattcaaattaaaataactgtatactattattatctgtattattatcttctcaacagattatctataagtaaaggtccaaggcccactccacgctataaatacaacccttcaggttctccctaacacacgacattccatacacaccactctatacacatctcattctcatttggtattctcacataatacctctctctctcatatatacttgaatgcattactcaagttccttattctccatatattaggccgagtccacacttggtcatctttacaaatttaatgttctgatttgaacgtcagagtgtttttcctttgttttgtagatctcttctctaagtaaagcctaactctactctggcatcacagaatttggaatccatcaagactacatcaaacccacacatagaatttccagattttgacgcgaagaaaaggaataacaatgtagggaattattaagagcaatgtcaagaaaagaaaactaagaaatttagatgaagattttaaatgacataacatatttgtattgacactacatgaagtgagatacaatcatggaacacgtgatttaaatcccccttttgtgacttatcctctaaattttcggtccatttgtttactagccactgtgatctggttaaaaaagtccggggtacgtactagtaaaaaaatctttattttatagcaaatcaaattaagaattaattacactatttcaagaaaatattaaacactcttaaattttgaagagatgttaattatatgtttaaattaaatttatcttgtttatcatgaatgattaatttacaccactaaaatagtagttaacgtgaaattaatttaattcaatcaataaataatctggtcgaaatcataattgagttgtgcatgctttgtacgcatatagaaattataaggtagatatcgatgttaacaacaacaacaacagagtcacaaactcaaatatatatccaccaataaaaatatccaggaaaatattaatatttgtaaaatatttatttatttaatttttttggttcatggggaaatttatttattttatttagtaattagcgaagttttgattatgtaattaatttacaaaaagtacaattttaattttaataaaaaaatattatatatttattaagatatataatttttagtgtataaatataaattatggaaaggaaggttcaattaagagtggttttaagaatttcaaactatatgtaattaacgagaatgcatgcatagatgattcaaaataccactaactttatgtaacagaaatttaatacatgcacaatgcgaaaataaaatgcctaattaggcccttattatgaccaccaaccaccaggccctagagtagctttctccttgtaaaaccaatattttgccttttatttatatatatttctacatttgggtgttcattattgttgttgcaagtttagttacagcagtcgaacaagtcctcagtcaaaaatttcactaggtcgtccagtgtcatgctgaattcatgatccatctacaatatatagtataatatctgattattcaatgttacatataagaaacatgttatatgagaaagaatccaaccagtattattaggctttatatttagttagtttttaatgtgtgaacagaagagaaattataagcttctgtgctctatcctctgattcttcatggctgatcctgtcaataattcccgtacgggttcttccagtgatgattttctcaaccctttctttctacatcattccgacggccccaacactgttttcgtcactcaaatcctaacaggtgacagctacattttgtggtcgcgtgcaatgttaattgcactctcatgcaagaacaaagttgggttcgttgatggttctttgcccaagctcgacgaatctgactctcggctgttggcttcttgggttcgttgtaataattttgtcatttcttggattttaaactctgtctcaaaggagattgttgctagcatcatcaatgatcactctgcggctgagatgtggaatggtctgcagaaaaggttcctaaaccacaatggtcctagggtttacaaactttgaagagatctagtcaatctgaaacaaggtactgattctgttagtgtctattatacaaaaatcaaatctctgtgggaagaacttgcaaattttcggccttcttgctcgtgcaatgggtgcacatgtgaaggagttagcaagatgaaagcgtacttcgaagatgagtactccatgacattcttaatggctcttgaggaaactttttcccaggtacgtggtcagcttttattaatagttcctcttcctccaatcacacaagtattttctttaattgatcaagaagaaagtcaaaggaacattggattgggttatgatatttctctcgcggtgatttgtgctgccaagcaagtttctggttcccatggcacattcaatggtaaaaatagaccttactgcactcactgcaagtttcatggtcacacaatagagaagtgtttcaaactgcatcgctatcctccaggctttaaaccacgatctagaccttctctgaccaaccaagtatctgaagcacttgttatctctaattcttcttttttgaataattttactcgagagcaatgcaaccaacttatttctatgttctcaaatcatttggcaaataatgtttctgttgatgaaccaaataatactactggtaacaatcacacaataggtatttagacactatttgcattcatatgaaattgtttacctcattaagacagattcatggtcactctgttattctacctaataatgtttctttcactgtttctcatattggtgatgttatcatcaatcctcaattagttttaagagatgtattatatgtacctcaatttcgtttcaaccttttatctgtcagtgctgtcacttctaatatacatgttttttttcaattctttgacaataaatttttaattcaggaaaccctgaacaagaagatgattggcaggggtgatgttgtggatggactatatgttctggaagttgttgctcctgttccttctatcaaaacttcttttgtaaattccgttactgctgatatctggcatagcagattaggacacccttcaaataaatgccttatagctatgaaacacaaactctgttctaatgacttaaatgtgaatgatatgcatacttgttttttatgtcctttagctaaacaaagaagattgcctttcatttctaacaataatttctctcaatctacctttgatttagtacactgtgacatttggggtcctttcaatacaccttcacattctggacataaatattttgtaactattattgatgattgttccaggtttacttggatttatttgctaaaaagtaagtttgatgttttgcatgttattgcacgttttttcaccatggttcaaactcagtttggaaagaaaattaagcagttcaggtctgacaatgctaaagagttagcttttagtcatttttttcaagagaatggggtcattcaccaatattcatgtgtagagagacctcaacagaattctgttcctgaaaggaaacatcagcatctattaaatgttgctagggctctatattttcagtctcatattcccctccgttattggactggatgtattgctactgccacttttcttatcaatagaattacttctcctctcttagccaataaatctccttttgaattattgtataatcagtcctttgatttctcttacatgaaagtgtttggttgtcttgtttttgcttttactttaactattaatagaaataattttgatccaagagctagagcttgtgttttcttgggttatcctcctggcagaaaagcatataaattgcttgacattatgactggtcacattttttattcatgtgatgctatttttcatgaatctatattcccttttcagaataagaataatgtgcatgacagacccgacccttttcaaaatttagtgttaccaaaaccttttctggatgaccatgatcatgtttctgttaatcaaactcttgagagcagtacaactgatttgcttgttaatactgaacttgttcctctaagaaacattgataatattgatcatgatcaacctataaaccatgctgctaagagatttgtcagaaatactaaacctccatcatatcttcaaaattatcattgtaatatgttggttggttgtgatttagttacttctgcaaagtatccgatatcttctgttattagttatgaaaaactatcttctagtcataagaattatattcttaatgtctcatctcattatgagccacgatattaccatcaagttgtcaaataccttcattggtgtgatgcaatgcaagatgaaattcatgctcttgaaggaaacaacacatggtcagttgttcctcttccccctcatgctcactctattggttgtaggtggctgtataagaacaaatttaatcatgatggcactctagacagacataaagcaagacttgtggctaaaggttatacacaaaaagaaggtattgacttcattgacacttttttccctgttgcaaaaatggttactgttaaaaccttaattgttattgctgcttctcaaaaatggcaaatgcatcaacttgatgttcataatgcttttttgaatggtgatttgatggaggaagtctatatggaccttcctcttggatatactattaagggtgagtcaaatgccacagctccaaaaatggtttgtaaattgaacaaagctatttatggacttaaacaggcttctagacagtggaatcataaaatctctcaaactttaattagtaatggttttattcaatcaaaaaatgactactctttatttaccaaaggagttggaccttcttttactgcagttttgatttatgttgatgatattattgttgttggtccatcttgatctcttattaactatgttaaaaagttcttacactctcagtttaagcttcgtgacttaggaattctcaagtactttctaggtttggaggttgctcatgccaaacaaggcattgtttttatctcaaagacattacacattgcagcttcttgaagacacgggcttcctagcttgcaaatctactcctgctccaatggatccaagacttcatcttactgaaaatagtggtgaagtcctaaatgatcaaactgtttatagaagacttattggtagacttctttacttaactttgtctaggcctgatatcacttatgctgttcagaaacttagtcaatttgttgctaatccgcacaattcccatttgaatgctatacatcacttgcttagatatttaaaaggtaagccaagccaaggtttattttttagttctaattcttctcttcaattgcaggctttcttcgattctgactagggagcatgtccagatactaggaaatttgtaactggtttttgtattttcattggagattcattagtctcacggaaatccaagaaacagaacaccatctctaggtcttctgctgaggctgaatacagggcaatggtctctactgcagcagaattatcatggttatctcaattaatatctgactttggaataagatctgctgaaccagctttgctgttttgtgacaatgaagcagccattcacattgctagtaatcctacgtttcatgagcgtaccaaacatattgagattgattgtcatttcatttggaattaagtctcggctggaagagttcgtctcatgccaattacctccaatcttgaacttgcagatgcctttacaaaacctctaccatccactttacttgaaactttacttttcaagatgggagtaaaagacattcactctccatcttgaggagggagtattaggctttatatttagttagtttttagtgtgtgaacagttagttttttgttactctgttgctgttacttttctgttttacttttgtatatttaaactcatattctccttttatgtaggaaatttttttccttttttctatctctcgatttactgtaataagtatagttattcttagaaggtaaaaatatatgcatggaagattataccaatggctttcttcgtaatatataaggaaaaatgtgctttttattccatatattttcagtcaaatatgattaaggtgtttgtattttcatattgaagaatctggggtcttcaaactttaaaaaaatacgatgaattaatttttagaaagaagagatcacattctcatgaatgcatggtttttaattttgaagaccaaatttcatcaatagaaagtataatgaccttgatcatatttgacagaaaatataaaaactaaattaattggggcatgtgtacctgagcaatgcaagtaatgttaagagcggaatttccaaacggcaaaacattgcaccaaactatggagagattaagagcttcaagcttgcccagaaacttaggtacaatgtccttttgttcacacataactttgatgagaacatcttttcctgatcactcttgcttcaactttgggacgtatatttataggtatatctgagccatcatcaggggtgcatgaaaagtcatcaacaaaagaactaacattggatttgttcattttgaagcatactgcagattctatttttctctttttgctgtcttcctccaaatcctttacacgcttctgaagatatttcacataatcgatagcagtcttaagaacagaagctttatccatctacacaaatgaaatattaattgtttcattttattagccaataataatggaataggtttagtggtatacttggttttgaattataataattttttaaaccatagtttgtgcagaagattactgtaaaaaaattcataaacatttccgtaagtatttataggagattgaaattatgaaaaggtaaaataatttgagtttatttgcattagctaaagttaacttatgtacttttttttttctaaaaattattttcatttaaattttctaaatttaaagtgtataaattaattttaatttatgaagaacctcaatgcattttattctcttataataagtatttctaaaaaaatttattcaaacaaaacctaacaatccaacgatttttttgtttgaagaggaattgacgaggttaaaaaaaaaatacttctgtcagtattgggacatgtataatttatcactctaaggactacatttatatataatgggctgatcgacctttaaattcttgagtttctctataaagtctcctagctaagtagaaattgtattgcgggagtatgtatcatgaatggtgtaaatgttcttgattcggttaaaattctggaacatatgcacggcatattagataaaattgctcttaatcaaagagagaacagtaaagtgcatcggtttggtcgatgtatgataggatggcctcaaaattaaatggtcaaataattaattaagatgcagttaaatatgtaatttattaattataattttattttatgtgttaaaataatatgatcgatgttatacttggatagttatcatccattgacatttttaggattagataaatgtactcatctttatttattattatcaataaatgaaatatcaaaatttatttttatcttctttatagcttttaatggtagttttcatggttttagaatagtctaactttcaacactctaacaaggtatttgcatacttggaatataatatttgtttatgaaaaaagaaattaaaaattattaccatatgcatattatgaaattatactaacactatgatacacctttatattaataaaattatctttttgatgtgatgtattaatattatcagcataaacttttgtaatattatattaatagtttattttcatttaaaaaaaaggaaaagaataatctttagtgtgaaaaacatttcgtgaaaaagttacaaagagatgtgattggttaaaaacttaaaagagagatatgaaatatgcagttatgtaaaagactttttacaacaaccccagcttgtatggttatgaatcccaattttcgtactctaattcgtaatgtgtttctcgcactgagtagcattgtttataagcttttgcaaaattagtggttcgaaactttctatccattaacttttaagccaaatttgaattctccatatatttggattttaattaataaacaaacctaatatatatataattagtttgaaactgcagtgcagtcacagttgtggctttgttgaggtaattgttgaggtaatagacagttttttaaaggaggaaattatgataaaattcgtcaggtttacatacattactggttgtgcttctattggaactgtaataatctaaatatataatctcttaatacaaacttttatcacacaaattgttaaagtaaaactttatttttttaattaataactaacacaaaaataccgaacgaactgtacctgagttttttttttttttccttttttatataaagtatgcaatatacgcccaccctatattttgcggtgaactgagatagaaaggaaagaaagacagaaaaaaaaaagataaagtgagaaaatgataaatataatagatgatataataaaattgaaagagagggaaaaaaaagtgagtaaaagtgatatatatgagaaagtagatagatgattagtttttctaatttttttaagaaggtttattttttttatttttaaaagcaacaaaagtggttaggagtccaatgggttatcaaatatgcattaattctgatccctatgagaattataggcaacacaattgtccatggttgtgatcccagataaacatatttgaaaatctggtctttaatcaagaggttctggattttcatggtattgtagaaagtagagtatttgattcagagctagggcttggtttgcttctatatgggacaatgactcattatggttttatgaattctacacgaatccagcatatatatatatatatatatatatatatatatatatatatatatatatatatatatatacactgtgtataatttctgaagtgttgattccagttttgaggggctctgcttgtattatcaaaagtatggtgggggacatttcttatgatatcgaggcaaaagaacctaaataatacaaattaaataaaaaattacgcatttggggcagtttcgaaactatttaccaatctggggcagtggaaaccgcccagaattgggcagcactggagccgcccaaaaccaggcggttccaagggggtagagccgcctggttttggacggctccagtgctgcccaattctgggcggttccacttcgtgacacgtgtcagtcctgcacagatggagcgatgcgtatataaacttcggacggtcataacttttgactggaatgtccgattgagacgaaaccggtggccacgcgttcgaaatatcgaggagaaggcgctagcaagttcccgaaggggacttggtcaaaaaaattttccaaaaaaagcttctaagtgcctcaaaattgtgatttaatcttcgaacatcccaaaattttcttgttttctaattttttaattatttagtcagttaattgcatgctattttttatttttttcattacttctatcaatttcgagcatttcgacatattctacacctcgatcggacatttctatcaaaagttagaccatttgaaggacatatcgtacgctgttgtaacttttttcgatattctaaattttatatggttttgtttaatttttttggattttttatataataaccccatttatcccaaagcacaatcattcctaacttttccgcactcattccacactttaccgagactcatcccaaagtgcactcaccacacaataatcggaattgtagcaccctattaattccaaagcgcacttggagcggggaaacattgcagaactctataaatgagagtggaactgcgtgagacaaagtgaatcaaattaaaatgcaaagaattgcattgcacttggatgtatatgttttggccacactaattttatacaattgagtcaccgattgacagaaagtctgagtttctgagtttcagtgtagtttcgatgacgggttaatcgactgcgtgcttttgactggaacaaaaagataaaagggaaattgtcttctatttttttttaaagagaattatcaaattatgagagcatgaaagagatgatgagagtgatgagaatattgtgtttaatggggttagtctcgatataaaaaatgagaagtaccaaaaatcatatcaatttttttgaattcataaataaaattgaaaagttttttttattgaataaaatattttattaaaaattagttatatatacaaaatccaaaaaatatcaaacaagatcatataaaaatttagaaattatattaaataaaataatatattaaaaattatatatacaaaaaaatccagaatatattaaataaaatcatataaaatttaaaaatttactaaataaaataatattaaataaaagtaaaaaatatcatatctatgataaagatcaatttaaaaatactttcaaattaaataaaaataaaaataaaaaatattaaatgatattttacgtcaaaaatcaaaacacgtcaattttgatttttattttagtcaatgatagtttttgcgacggaatattttggtcacaaacaaaaaaaaataaaaaaaccaaattttccgtcgctaaatcggtcgctaaccgaaaaaaccaaattttccgtcgctaaatcggtcgctaaccgatttagcgacggatttagagacggatttagtgccgcccaaaattgggcggttccgactgccccagattcgtaaatagtttcgaaactgccccaaatgcgtaattttttatttaatttgtattatttgggttcttttgccatgatatcgatgtgtatatatttctttgggggtagggctcgtgttcctaggttccatgcagtgaaggttaatgtatttattagaggggccttcttttgtctggggttaggtattacatttatggtcattctggcatgggactcagctggtttgggttctttctattgggtggattttcggtggttttgacacctttggttatacatgacaaggatcttgttgatggtgtctacattaattaagaattttaaaaattataaaagaatgtaaataaaacataagtaatataattttatgtatttttataatttttaactaatattctaaaaatactaaataaatattaattagtatctttaagaaattagtttaaaaaattaaaaaatatacttttatacataaaatcatattacctgtaatattattatgttttaatttctataatttctgtaataaatattttttcatttttattctttaattaatattataaacacacttaacacccatcactttttgagttgagactgaggctcttaaatgttttataaccgggtgaggagaggtgtcttttatttcacctcctcactctaatttgtattcctttgaggtactggccggtaattgtttatttataaaaaaataatttggcagataaaaaaagtcaaaacccatgctattaatacggaaagagataaacatataaactgacctttttcaaccctggaataacggctgaaagtgttatgaacatcttagtgagattctctctcctctttctctcagtcattatgtgatcttgtatctgagaagagcttctggtacccctcttatattttctttcattttttggttcttctttggtttcctttgaattttcaccatgataatattggcattttgagtcctcaaatgaaagagtagtgtagggcattgaagaggagaagaagagaggttcatcttgagatgcatgttgtttgagactactacggttatcaaagccagtgttctcttccaaagatgatgaacttatagggttgctaagaattgtggtgctttctttcgtgagatttgaatcacaagggtgacttttgcaagatagttcttgttgcactaaattctcccccttgaacacttccccaagaaagtgcatgtgaccaaataaattgcactcatccatttcctgaaacaattcagaacaccaaaactagagaaattttcacaaggattaatataaaacatatatgtgtgaatactatgtgacatttatgcacgcgatgcttgattcaaatatcattgttaccaaataaggaggaagccacctttcccgtgactcttccattattgatgccaaaaatcagataaatttgatgttccagtttttgcttcagctattgaagtaatgttatcgatgattcgatgcatgtgagactccaactaaaactaattaatttgtagagggtaagtggttgggaaaggaaaatgatggaagagacattttatttatataaaaaaaaatcattacattattattctattttacgttttatgtgtatcccttttttgttctatttttctctctctctaaattgttgtgtacaattaacatctcttatcgttaattaaattttagataatatgtggcagacgcttcagatgacacgttcactcacgcttttctatatcaagtacgcatcacatgatcgtgaagtcaaattggatcagtcattattttgatagaaaacaaatctatatctatattttactccaacaaaaatttaaccttagtagctaggtgataaaatacaaaacagtataaaataaaatcttatccgccgatggttgattaggagctttcaaaatctatatacacagaagactgtcaccagagagaccatcaggtcatttaatgatatagcattggacctacacccatatgaacaaaatcatcacattattctagccttttcctatcagagatcggaactgggatattcaacacgaaaagattgtcttttattgaagagaaaaaacgttgtaaaaataatatttatattaaagagtaaatagcaaactctttttttttggattttaacaatttctctaaactttttcaaatatttacttttaattcatacagtatttttagtttttatgttttttcccttactgataattttagtctttgttattaagtaaaaattttaactgacgtaataatctcattgataatctaatgacttgttatgttattaattagtctatcaaaataattacatgtaattataatgataaatggtgttttaattatccattaactaacttaacgtaatcaagtagtctaaataaatgaaggattaaaacagtactagtacaaaaatgtttttctatgtcgtcatttctacattagctagtaaataacttatgtatatagtgacatactgacattttttttaaggaaacgagtttacaccatttcttacttaatggatgtagaaacactatgtttacatctattcaaataagaaccaatgtagaacaacttcatagcgtctcaacccctttcaatttcaccctaaatcactcattggtgccctcacaacttctccctacaaccctcgccgccctcaaaaccctttatccatttcactcccaaacctcatgatcatcacaccaccaccatatatgataattgaattttatacttaccattttggtacatataagtgcaactatttcatctctcccctatttaaatccttgtttctaccttttttagttcaaaatatttagtttttagacatctacttagttatgtaaatttggtagttagtctcatgtttttaatcttttgatatctagaaattgaagttggattttgaagcattttaggatcaaggtcaaagtgaaatattactgttggtctagccagacattgagcccgacccaaccaaacacaaggtagggagcaaccattcattggagaaatttatggctaggtgaaattggttctggttgggccgaaagcaagttagtagcacttcatattttggagacaattttgggccaacaagcccaaccaggatccctttaataagcataactgagacttcggcctagccgaaacatattgtagatggggcaaaactatcatgttgacactttttggacataagacaacatttaaagggacttttaggaagagaacatggtatattattctctgacctaggttttggcacaagtggagttgcttgggaaactcttattcctccatttttcatcttcttcttctatgcaccattttgaatgctcattttaaccataagtggctaaactcccctttgttggtgtttgatgtaactaaatccaaacttacgtatatcttttgagttattaatacatgtttattattcgttgttttgtgtcctctctttagcttaatgcttgtttttgtttgatcacctctttgcttgattctatggtttaaaagagattggaaatgcatttgaattatgaattagagaaaaacacctaataaagacagaacaaaacacattagtcacctttagttaagcctttttcttaaagataaaacgtgactaaactatacaaaggatttataattaattgagttaagggatttaagctttttttcttcttgtaaggaatcagggattgaacattattatttttataagttgatgataacaaaaaaaaaatgataaacattaattattaataacttaatttgttgatacacgagggagtgctttaactcaaactctaatattctttgtatattattgtgtttcgtaacatttattcttattctatatctttgagaataaaacaaaaaaaaaacccttttaataactgtataaaattaatacatccctacacatgcactaaatccctgacaactaattgtctaaccacccttaaaaaaattgtctaaccaattcatcactttgaaccatttacattcacgagacatgcctatttgattatacttcctaaaaaaataagttaaaatttgtttactctaaaataactttttactccaagtctaaaacaactttcctcattccaatcataatatatatatatatatatatatatatatatattgtccattcttttctccttgattggatgaaaactagcttatatagtcatcacaaataattatttctgcgaaataatattgcggcgaaaggccaaatccagttgtttgctcgtatagtcgtcgtattaattagggtttgttgaaacatgaaagcataggccccaggagttggtgatacgctgacatatacaaggactatttatctttcagtttagtttaatttcaaggtaaaatgattaattcgatttaaaaatgatattaaatctcaacaaatctaatttgctttttttgtagttttaaattaaaataatttttatttttttaaggaatatcactttattttatgataagcatactttattttatggtctctaatatatattatataaattcttgtagtgattattttttatttatttaagagaacacttattaaatattttttttaatatataataaatattcaaaacttaaattattaaataccatcataaaatcttaacctgaattacagataacactttaaaataatatataatttatttgagaaataggaaaattaatataaatttgttatacttgcagttcagttaaatttgatttatattttgaacataagaaaaccaaaaagcgaattaaattgaataaaaaccatatgttctttcaaattttaaattaattatttattagattttttatgatttcaccatttagatgaattttaaacactcttaatatgcatatattaaaaattttatttttataatttattttcaaaatatataattataaacacgattataaatatagaaaacgttgaaatttaaacattgtttaaaatattaaattttatgctaaaaaataatcattaaaatatgtatgctctacatattattaaaatgtcttaatacagtactgtagggatgaaaaaactagtttttgctcctaggacacataagcatatttcctctccctttttttaagtaaatatagattttatatatgagaaccagcaataagagtagatcactctctccagtttttgctctttgtagggatgaaaagggaaaggattaacttgatcaaccttaataataaaattaaacttaataaaaaccaataagtctgattaaataatgagaaattgacgcataaaaataataataataataagacattgaatgagagtaatgctaataattaatgaatattcgatatattagtgaagtattgtatctataatggatttgatctgacttgacttaaataatccaaccaaatctagtcgatccgaatcaaaacagggaatgaactataatccaaatcaatctaactaattaaggatgttgatgatagacttctcctaatgagtaatgacacagttatatttaaaggagttttttttttcacagatcgagtttaggaagttagacctgatgtattgtaagaatgaatttgtgttacacttgaagtcattctaatccgatcctatatctcatgttttttctccaaaggtataacttttaaataattatgtattatatataatataatttcttgacttataaaaaatgttctatcaaacataatatttatatagattttctttatcttaaaattgacattataatttgcagttgtatacttattgaattctacgatttaactatatatatatatatatatatatatatatatatatatatatatatataatgataaacaagtctcttctaaaaaaaatgttcaacaagtcattttttcattatcagtaaataaaataccttcattgaatatggtacaaggagtagcagataaaagtttacaacagaagtcaagttaccttagtcttgtcctatatttgttgagtcctaattagatcgggttcgaattcactaaattaaccctattaacaaaatgttaattaacttgatgaaaacatggataaactcatcttgacccgttccacggacatcttaaatccaacccatgatgttctatccaatttggattttattttcctttaatcttgatccgaccaaacccatattcaccacctacctctttgcagtaacagtcaagctagcctctatgcatggccagaatccggttcaacttgtttttcttcttttggcctaacaaaatcatctcaaaacaactttcaattttgtcacgttcttgtttgattcttttgcttcctacgatcccattccccaccagcacctccaaacacgcgctacagtctcatctctattattacatgacacgacagcaccatgtttcttcgatacacataacacccatagcctccaatatttggcatttttcttttatcaatttctttgcttcggatcctcacaattagaggtggggggtaagaaactagcttgattttttcaggctagttgtccttttataagctttaggctatgtttgcatatttttaattaaaaaaattgaaatgaaatgaaattgtataataaaataatcaaattatttaaagaaaaaaaaattaaattgtcttctagtaacacgggtagatgtgttagtcatacttttcgtttcatttacgttgtaaattgtaatagggttcaccagtttaggatttacttataagtataggcttgctttgttcaaaaaggaaaaaaaaaagaagtaataaattatatgtttcaatattatttgaaataatatatgaaaaatgttataaaattagaacttaactacaattagaacactttgtttgtgaaattcaacatatatatatattggatgatttttaattaattaattaatagtataaaagaatttatattaacagtgtatcaaaattgaattcataaaatcattaaataaatttttattcataaatatttttattttaatcaaacaattattaatactattctgtttttacgaatagggatgtctaactaaatagctaacagattaatcttgaatcaataactctccataactctctcttaggtatttatggatgaaataccctagaataagcagattaccgtgcacatcgataaggcatttagccaatggacttgatgtgtatgtaaagtgacaacatacaatagaattaagagataatccacatacctgtgagagaatctcttattcataagggagttacatttaggttaattgctaccatcttgtgcttaaataagatataacatcttgattagataatatatactaccttttgggattaggatatgtgtttgttgaaatctccttctatggtcgttaaacactttgttgagattttctcaattattgttgagattcttaattaatgaatccttaatgagaaattttaataatgcccattaggtccttaaaaaattataaattaattaaacttacttaccaaattcacttcgaattatctcttattaatacagttgccaacccttcccatgattgtgagactcacaatataaagacaaagtgatcatttaattttcaatatagtgaagacaagattggggctttatcattcaatttcaggacccatccacccgtttgatttcttcgagggacttctatttaatcatgaatatcttttcttttgttttctttttatttcgctaaattttcggtgcattaatcactcccctatgtgagaaagatgtttgaacctcttcccactataatttaagtgaaaacaattatattttttctaaagagaagtgacaacaaattagttaattactttattcgtgtcagaccaaattaacatcgtttacgaattataatctaaccatgctatttaagttaaaataactttaaaaaagaaccttaggttataaacctattgctattaaaaaagttaatcaaataattcatattagatgtatactgacaaaatatatatccatatatatatatattatttaagcaattaacaaagatttaattttgtaaggaaaacgtagacttatttattttattaagacagttatatgtacagtttataaatatattgaacttgagatattaaatttttaaagcttagaaattttggaaaggggggactcaattaatagtgcttttattgaaggaattttcaatttattttcgagaaagtatacatacaagattaaaaatatacaaatattgaaaatacacaaaatgtgaaatcacaaaatcatcttattttgccataaaaatgatgattatttgtgaagaaggccaaaaagacaactattatgcacaccaaatgcataatatatgaaaatactgccaatattaattatctaatagggcaccaaataaaatgcttgaactgcttaaaatgcacttttaaatttactggtagccaattcgttagcgtggctcattattgttggaatttacagcactccaacaattcctcagtcaacattttcactaggtcgtacgtgtccactgtcatgctgaattcatggtccatctacagtataaaacaaccatatattgattattaatgttccatacgataaacatgcaagtgtgagaaagatactaactaatttaacttttcctagaaagtaaatatcaattgattttaaatatatagtaagcatgtaagtgttagaaagaaatgtctatccttataattatccttagaaatttataatgtaatttcgatttatctaaacaaaaactatgtgcttttgatccctttaatttaatttttatacttatatccttttattttcaaagtttagcatatttagtcctccatgcacggatttttttacgacctccaaattcttttataataaaaaaatttggtttgtgatgaaactaataattaaatgatattaaaagtttagcaataaaagaatcaatagaaacttggttgaaacaagatttgaaattagaattagggacgacaattctttagatatttttatgggtcggttttgaaaagaaggaaatttaaatttattcaatttaatttgtaaagattatgactaggaaaatagaatttgagggttttgtttgtagaaaatttatgaaaggaccaattttttatattttaaaataaaataatttaattaacttgaaaaataacttaaaagaaccaaaataacataaaatccaaactagaagaaccaaagatatacttaccaaagtaattacatgcatgtatattgaagatgaaaaaagacattagaaaaagtgtttttttatgttttggcttttccaaagagagtaacttgcttttaatgataaagtaagcaatgtaaatacatgtttggatttgtaaacttaagttttggttaaacttaagtttataaactaaatttgtaaaggaatttcaagtcttatttttttttttttaaaactgagtttttaaacaaaattttactctaaaatatacttttggtgtaactaaattaacatgatcccaaactgttttgacctccaaacaaactttaatttggaacactttcaccgaaaatctaaacatagtctgatgagccatttttcttatcgacacataccctaattgatgaaataattattttctaatgctctaacacattcatgatttgttattattatgcatgtaatattatctaattgattttctcattaatgactgatattgtttatttcatagttaattacacttatacttcctaaagttattttcaattgtacataataatctagctccttgctccttttaacttttacaatagattttcttacaattaaaggtccatgatataatattttttaaataattaaaggattaacataatataaggattgtcgcacagaaaaaatataatgtattagtattatcagtagtgtaggaataaaaaagaacgaatattttgtgtaatatgaaactatctcgagaaatattaatgtaatagataaaatctgatcttcaacagtaatttactttctttttatcctctaaaatgagttgtttactttagagaaatcttatcctttttctaaacatcaaagtataaagatgaaaagttatcctattgattcttttttggctaactatctcatttaattttaaaatataatttttgacatgaactatggaacatgaaactgatctcttctaatcacgtcattataataatggtgtgcacctaccatagcaatgcttgtaatgctgagagaggaattcccaaaaggtaagacattgctacacactatggagagattataagcttcaagcttggccagtagcttgcgtacaatgtccttttgcttctcacacgttactctgatgagaacatcttttcctgagactcttgcttcaactttgggacatttctttataggtttatcatcacaggttttgtttattttgaaacatcctaaggattccgtctttctcttcttgttctcttgttctaaatctttcacatgctgttgaagatatttcacatactctatagcgttgctaaggacagaagccttgtccatctacacattaattagaaatatcttaattattattttataagctaataatggattggtgtgatataaatttcttaagtttggcttcgatattacaataacaacaaaaactttattccactagatgaatcattcatctctctctctctctctctctctctatatatatatatatatatatatatcacaagaaatcattaaactagcttaaaaatcaaattctgggaaatattattattaggcattgaaatcaaactagcatgaatcattcatgctattcaaagtttagtttaaatttcaacaaagggatctcatattttgtatggtatcccatagtgtttcggatatgattacctcaaatttagtatttctgagggggaaaaaattatgtcattaaaaagtaagatactcatatttagtatccgacaatttctcaaacagttgtgagaaagaaaaaatcatgctattaaaaagtaacaaaacatatgaactgacctttttcaagtctggaataagtgctgaaagtgctataaacattctgctgatattctctctcctttttctttcagccattatgtgatcaagtgtctgagaaaagcttctgcccctcttgaggcgtttgctattgtgtggcttttcttgtgtctcctttgaagtggaatcctcaaaagacagaatgcaagactttggtttctgtggagaagcatcttgtttgagacttgtcatatcgaagccagtgttgatctcttccaaagatgaagaattgctcacaagggtggtgctttctttagtgagatatgaataagagtgattttcccatgagagttcaccaggatccactgaattctctccctccaattgttcctcaacagagttaatgtcatattcactgaataaacgatagtcattagtgtcctgcaagcacaaaaaaatagaataattttcaggaacaaagttatgtacataacgtatataatcataattatatatcatatgttaatatatatatatatatatatatatatatatatatatatatattatgattgattcggatctcctattaccaaaatagaaacccattttagccatgactcatccattgggtacttaaatttggaaaaacttgttcctgtttatatatatgcttcagctattgaagaaagcagcgacaaactcaacgatgtaggactccatgcaattattatcatgatttttattattattgataaaagtattattacgagagaaaatatgtggcagatgctaaagacacgttcctcacacttttctttaataagtgttgtcatcgttgcaattacgtcatgcattatcgtggtttgacatttgataggtgattatcttttaatttctagtgtgtggatgttctgttgagtattattaatatcattaatctaaatcaaagataataacaataagggacagaaaaaaatttctccttaatttctaatgtggctatatatttttgaattggagatttgcatttaaagtaaaacgaccctttgtggtaatcattttaagagcttggtactaggtatgcctttattttgttttgcatatatttagaattttttgttgtcttgttttatatttattgattggtatgcctttattaaaacttttttatatattaactatacacattaaactctttaatatttctttatttatatatcaataaatataatataatgatattttctatcaataaatattaattattaataatattaatatttattagtagagaaaatcatactcgaaatctattttctcttttgttctcccttaaatgtagtagtaatatttttttttcatgattgcatatcccaacttttggcatcttgcacgggacaaagttagaagcacataaagattttgaaaaagaaatgcgagtgcaccaaatgtacaccaaataacttaaactcccattggtttgcattttcaacgcactcaaattgccggttgaccataggggaaaattattcatcctgttttatcatctcgtactaaaaaaaaaaaaggcttatttggatttgaaattgattaagcggttgcttctcttggaatatcttctaagaaatgaagccttgaaagaagaaattgattggtggatgaggtggtagaagaggtcacggtttgtaggcagcaaatagaaggcaagacaatgaaagcaagatccaaggaaaattggaattggccttggctttgggatgctagctcctacatgtaacacccccatatgcatctggtgtattaacaattacttaatcagattaacgcagtaattaatttaaaaccaattaagtaaaaacaacagaagcgttttcaataaaaacatgacgtcatcgtcatttcctttcaaaaccatatttcctgattcattatgtatggtgcgtatccatgatacataaacgaatgccacgataccacaacaagcctctacgatccagataacataaagaatgacaggtaaaggcaaaatatatccatacagatagaacaggagaatcaaaagccacatatgtctatatgtctatatgggtatatacatatatacatcaccaaaaaccaccactgtggctatacaaaagaatgggcaccctgtgccatgatctcacatatcacatcctcacaagagggtacaaaacgtacaacatctgtacatcacatccatacaggatccaaaatatgtgtacactcacatcttccctcgcagggtacaaaatacatcataaacataaaatagtgagccacaatgctctcgaaatattgccaagcagctacatagagtctatccctaatggggtctcccgccctgggacccatcacctctaccagatgtatcatctgcaaaatataatcctcacacatggggtgagatacaatctcagtaagctcagggttcttggagggttctcctccccctggctcacttctatgatacataacatcaaaggcatcacaacaccaggcctcatggccctcacaacaacatatagacattctctagctctaatgtgtatctgcggtactacgcccaccaaagatgcatcatcatcagcatcaggactctcagtcctcaatgtgagactggaactcacacacgtgtcatcccatcgggagctatccctttacacatggatgcacgtatatggcacttctgagaataggcttcaactgcgacgagaccacctatctcaggtgttaagggatcatacaccctttacgtgagcaaactgactaggagttgcgctctactcctagggaggtccatatttatctaactggccagaagatctatctgaaaggcaaccaaacacaaagcatagaaacatgcatacatattatcatgaagaaagctgtaacatccaattcaatgcatatgaatcatgtatgcaaccatcactcccttggagtatggtggaactcaagcagtgggaaacgctcccaagaacaaagaacttaccaggcaaaaccgtgctctgctgttcaatccctgaaatgtgatctccgccactgacaccctcggtgtcacgccctatacaaaggcacacaagtaatcaacaatggttcttaacctttagaaagaaaaggaaagcaattcttttccatataaacctcttttctaagttataagaacaagtcacctaaccaatgacttacagaccctcagcaggatctatccaggcctaaccaaagccctagagtctttctaagactctgcataagtcaattcaaagagttcaacactctatccaagccacatttcaaagattatcaaggctaaaacggttacttcaacacattttcaccgtttatataatcttctaaacgcatcttgtgaaggcaccaaggcccaaacataccatatcatcatcaatttaaccaacattcatcctacacatacattctttagagccaaattccaaagtccataaaatttatatttcaaggctaaaccttcctcacaatgacctcctaagcatacttttccaaaggacccaagcctaatttcagctctaactcaaatgggtcactattcacctcaagaataaattcttaaataatcggtagaatttgagtttcttacctccaaatagacaaggaaggttagaggacaacttttccaagcttgggtgtccttaaaacacctcctttccctttgaaatcaaaactcggaaagtttcctagagaaaacgatctctccgtttgatgatttttagggaaaattggtgatgaaatctagctcatagaatgattaccttcaagtttcatgttgggtgtgaagtgttttgtcaatggttgagtgggtacggagcttcccaagcttaacaatggtggaaaaatgctcaaaggaagaagaaaggtgcgttttggccagaaaacacgtgaaatggccttttatagtggcccagatcgcgtcctggcactaattgtgccacgcgtaaaattggctttctggcgcacttctgatgctactggcaccatcttggcattaacggcgccgcatatggcgctattcgcgtcaggaactagccgtcaccgattccgtcgccaattacgtcgctaatgtttttttgcgatagaatattgtaaatttaaacttttttttaggcttggtcattatattacgtgaattttttccacagctctaactatttatactcatttattcaattgtgttttaagtgatttagttgggttataactgaattaggatttagtttggttagaatttaactaggtaatcattaccttagaagatattatgacttaagcattatcttgacttgatttttcttggtcaagattccattgaattcttgacttgggggcagctagcctatgcacgtggaaaggcttattcaagaggaaaaatttgattggtttaatgcttttggctgaaaatcatctcttggtcctaagttaattagttgccatgtgtaacaaattttttttccacttccaaatggcctagaaagttcatgtatggcttgcttggtcttattgagaactcttgtgcacgtgggattgatcttggcatgaggaaacctctgattttgtcaccttttgggttgaagattctattccttgggtcaaaatttcaagagttacaagttgtgcccaatccaaatggtccaaagggctagaaacacttaatcagatggggctcgctcattgtttattttgtaccaatatattggtccaaaaatttctcatcttctagtatgctaaactagacttcctaagatttctaacaaggtatcatatgccttatttggagttataaaactcaagatatggcatttttaatctacacttccaaaactgccagcgaattcaacttaggacaatgacatcccttagtgtttttgttatttcaggcagtacacaatctagattgatctgaaatttttatatgttatagtagacatctagatatttaattccatataccatacactaaatttggataagaattgagagagaaataaactttcaaattcgggtggcagaaacggaagatttggacagcttatgtacaaataaaatttatcctattcttcttgtatccaactatcatcctacttccataattaaatcataaatacaactcataatataattttgaggatgttacaaatttacttgacaattgtctagagttcagtggtctcctttcattttatgttatgctttccacaattttctcctttaggcccttcatatttctcaatgttgttagttctcacctcaattagctgagtctaattattgacaggtttgcataggtgtgacaaaagataaaaccttaagtggatcaattgcttatggtttgatttcaacagaggtatattatcacaagaagaaaaaaatattattgaacttcactttctttttcttatttttgctgcacatccattttgtcattaataaactatgctagatcttgtaattttttaaatatctttccagtatatcttaactacctttttaagaattatatgtgttcaaatatctttcttatcatcttttctctttttctcaattctgaaacgttcttttttctgatgttctctgtcttctcaccatttttctctcttttcttaccttctacattcactcaatttattttctctctcttctaaaaataaaccagtgaaatatctttttatttcttcgttaaccgttcaacatcgcaacccttgctgaagatgcctttgttagccactgttactataacttcttcataatttttttcatgatttatggtgatttgtagcaacaaatgttaacaattttcttattttctattttcttggttgattttgttttgccctaattactttattttttcctccttcatcaaaatttctctaatattgtgaatatggactaaatttttctaaaaagtttatttgatatgtcctattggttaaagtattttgtggaaaaagatactaaacgggtctttataagaattgatgagaattggagaatttttaaatatttatttgattttgttctagactgatttttgggttgcaaattatgtgtttgatcaaatgttaaaatgacatttttgggtatgtttccttattttttcttttacttttaaatttatgacacttttgagactacttttcatatgagaaccagtgttattaaaatcgattcggccattgatccagttaaggtaatgggtcagtgggttagtggtccaaccggtgagtcagtaattgacccgatttgaccctgtctatattaaaaaaatttaaaatatattatatataaatacataactaacattatttgattaagaaaaatatattcaaatattcaaaataacaattgaaatattaaagttgataatacaagtaaagtgtattaataataaaagagtgtaaatagtaactacttacattagaacacaagcccaatttttaaaataaaaaaatgagccaaaaggagtatagaaagaaaaaagaggggtacaagaagcaaatgtggttctgaggcccaaaacgaaaacctaatcccctactatatattctttcttatttccatccagtgcctctttttcttattttctcccttctctctatgtgctgctccctacacccttcccctagccgtgccgtgccgcgtcgcgcctcaccgatccgcgcctcgccccgcccctcaacgttagtatactcattttctctcttctctctctacctgttggtctgctaccctcttcctcttttctctcttcctgctggtctgctacctttattcacgttatcggcaacgaggtcgctcgcggcgatggttgagtggtgtccacgacgtgcacaactcagtctgattttttaaaacttgtccgggtcgtcggattcttcaaaaatctgctgattcttgtcaggcctgacctagccacttgcatgaccggttccacacccaacccggcctggagccaccaccggttcccggtctaaccaatccgatcggcgggtccgaaccgattttaataacactgatgagaactttttagttgattccgtcggtttggtattatcttatagagagaaatgaagatattacttggctaaattgaaagataagagctaaacaagttgaaagtttactagcataacattaattttacataatttttttgttgttttctttaatttaagttcataaatgaaaatattttgtctaacaacaaatgatgtcattttgaagtcctaccttttttgtcacatttatgttaccaacaaattcaatcacctatgcaagttatatatataccaaattcattttcaactaattatgacgtacatgacaagtttattgacttcattgtacacaaattctcttatattatgactgtttcataatttttcttgattttggatcacttcatctatatactatctactttattaacaaaaataatctcatttatcatgttctctgagtttagctttgacaagcttattttgttctttatatttcactatccttcgtcatgaccaggttgaatagagctgtcatggggaacaaaagtattaatgaataagaaaatttaatgaaaaaacctaccttagtatcaagcataatgacatagaatataccagtgttgttgttcatttcctgattatggttataggtgccatgagagaaattgaaacaagcaatgttcatgcctatccaaagaagtttctcaatcatttccacatttgcctatcacaggttcctctacttaggttgctcaactttaagttatgaccatactaaaatacttataagaataactttatattatcatattccaatatattttcttatcaacaaatttctttatttttgcaactcatcatgattctaacagtatgttcaatcatcacaacacattctctaaaacctccaccatcgttcatcatcggacgtcgctgggaaacccccgaagtcgctgctccttcctcctccgtcgtcagcttcacgctcatataagggtttcaacctccttctcttttgttcgacctcatttctgctccttcctcctttgccttcagcttctcgctcggacaaggtttgcaaccttcttctcttttgttcgacctcatttctgctccttcctcctccgccgccagcttcacgctttcctgaatgagtgtcatttataaggaccaaatgattattttaaacttttttttcattaacataatcttttaattatccattgcaatgctatgcaggttcagttaaatcctttcaggcaacccatcattttattttatataaatttgtattatgtaaaagcaaatattttgtttttattttttattttgaaatatgattctattttgttaacataatagaatggagtcaaacataaatcaaagcaatagttcaatacaatccaatgcagaccattgtggaattatgttactaaaattggggatgaaaatgaagcaggagggaatatgacttggaagtgtaacttttgcaaacttgaatatagaagttcatacgcgagagtaaaggctcatttgttaaagattaaatgtaaagggattggaatatgtaagagtgttaaggaggcatctttgatggaaatgggaaaattggaagaggaatattctgaaagggtgaggaataatgcaccgagacatgttcctttaccacccacaagcttttcagctacaactagtacatctgctaaaagaaaaagaagcgatgaaggaactgcaagcatgagtcctgttgagagggctttcaatatgggagagcaggaagaattaaatcatattattgctcggatgttttattttgttggattgccatttcatttggcaaggaactcgtactttcatcaagcatttacttatgctgcatacataacattggaggtatttaatgttatgaaatattatgtttctttttatctcatttatttcccttatttttaactattttctgttgtgacttcaggttatcgactccctagctataacttgttgcgaactactctgttgcaacaagagaaggataatgttaataggttgtgtatccctgcccgatctctttggagaacaaacggtgtgagtattgtcagtgatgggtagagtgattcccaaagaagaccaataattaattttatggcagtatgtgatggtgcagccatgtttttgagaagtattgattgttctggtgatatcaaggataaatattttatcttcaacttgctaaaggaagtaattcaagaagttggggtggagaaggtggttcaggtaattactgatattgctactaattgtaagggtgcagggcaagttattgagcaagaatattcgactatcagttggacaccatgtgttgttcacacgttgaatttggctttgaagaacatttgtgtaggcaaaaatgtggagaataatgagattacttatggagaatgtagttggatatctaatattgttggccatgtttcaacaatcaagactttcatcatgactcattctattagattgtccatgtttaatgagtttgtgcttttgaagttcttcctattgctaacacccgatttgtttccatgattgtgatgttaaagaggttcaggttgataaagggtggcctccaaaacatggtcatttgtgaaaaatggagtatttataaagatgatcattaaggaagggcaagatttgtgaaggagaagatattagatgatgagttctgggcagaccttgattacatccttgctttcactactcctatttatgatatgatcaggttttgtgatactgataaaccttgtcttcatttggtttatgatatgtgagatgcaatgattgagaaggtaaagaatgtaatatacttaaaagaaggacggatgaatggtgaggaatcaacattttttttcatgtggtgtatcatattcttatagatcgttggaccaaaagttcaactccctttcattgtttggcacatgctttgcatcccaagtaagttttttttataattttaacttagtttaataattatattatttgaatccattttgaaacttctaatttttttgattttggtagatactacagtgatcaatggcttgttgaagatccaagttgagtttcaccaaatgatgatgtggagattaatttagaagtaaaaaagtgcttcaggagacatttttctagtgtggagaaaaagggctatagtaaattaagagtatgtcaactttgttcaaatgaaaggaggttttagagagtttgacgctattgaagatcgatataaaatgaatcccaatgattggtgaggggttcatagttgtagtgcacctttgcttaaaaaactagctttgaaactcactgcacaaccctcttcttcatcatgtgctgaacacaattggagtacctcttttgtgcattccatgaagaggaataaaatggatcccaaaagagctgaagacttagtttacatacataggagcctccgactcttatcaagaaagagtccaaaatataatgaaggagaaagtcagtatcgggacattagtggagatgcagttgatacctttaatgatgttagagctttagatggtgctaccctttccctagatgagttaaagttggaggcaaatgttattagtagcactccatatccacactagttgaggtatttatcaatttcgtatggataacctattatttgtgcttatgattttccttttattatattttattaatatgaaatacattctatataaaaaaatattatttaatactaagacatatcggaaacgtatcaaaatattagtatttttgaagtaatatatcgacgttccgtatcgggaacgtatcgaaaatgctgtgttggtatcggtgcttcataggagataagtgataacagactcacttagcacagttttagagttccatcataaatgttgatgggtgcaaaccgatcgacataaaataaatacaagcgtttatactttatataaacacatgcacaataaaacacttcaaatgtgtaattgttctcaagatttgaggtaggagagaaaaggatcgatgtaagtaaatcttctctaatatacatgtggatgacaatatttttatgggaaagacttgatcgaagaatgtgatgactattaaaaacatcctagatgttttaaattaattttcggactaaaagttaatttcttgtaaggtgcttatatgtaactatatcaagtatttcaacaacaccttacacaaaaactagaaacaacaacgacaatccaagaccaaaaaagaagaacgcgcgtatgagttgtatcatcatgtagttgaatgtacatacgtactgcaattcccatcacaagttgataactgatcgatgatgacacatacacaataacaagctgcatcaaaatgcaaaatgcaaaacctcactactacacgaataacatttaacgacagacattctacatcaattattacaaaccgtcgtagttgacaacgcggtggcatttttgtaataatgtcgactgtccaacgacggttctttggaaacccgtcgttattggtgagaacgatgacagttgttggtgaaccgccttagtaaattccgattcaaaaacgggtttatcgttaaaccgtcgttgtccttttaatcaattttatttcattttggaatcccggccttgcccttcgtacgacaccctaaaattaagacatagtgcccccaatccaaaccctaaaacttacacttctccttcgaacaacccaaggacccttccgcctgtaaaccccttcgttcaaattcataattgtagcagtcgatcagttccaaaggccaaggtaaggctggaaacaagtttttgtttactctagagtgtttgcttggtgcctgttgttcttgatgtgtttgcacacatgcgtttgtgtacatactcaactcttaaaactttaaagttcatttgaaataaataatcaacagcttttgttgattttatactatgcccaaaaatagtctccttccttcccatagctttggattctgctttatgatttgtctatgttcttcatttgataaatgatgttttggattgaaattgtactcgggatgtggctgttcacccgttgaagtactttttgaggattttttccattttttcaattggcttattattttttcattttccaccatcacactgatttcaatgtttgagttggcaaaagaaggtgtgtgatagtggcctagttgcatcttttactcattaacttttggttattgcaaactatttctatctaaacatccttaaaccatccaacaaattaaagtggattctcactttgtttttccttggtcatggttataggctttaacaactaatgtcagtccttcatatccatagaggtgcaagggaattatttcttgtccttgctagcaatctctgctccatttgtacagtctaattaatgttacaccagagtcagaaacttggacattggttagagatttgttgtccttgcttgcaatctctgctccatttactatttatcaccatacatcagtaaatttatttcaaattccaagctgaatgaattgtgatatgatttaaaggtatccatgcataataatattttcaattaattgatttagtttctgttaatttaatgctggagatcaacttctgttttgtttgggtagctcctgttaaaaccttaggacatgtcaaagataagattgtgaatacaagcaatttgggcaggggctgtttaaagttgcaatgctttaaatactaaataaattatgattgaaacaatagtcagagataatcatgttctggcactacaatctctaaaattctctttgacctcatcgcactataagtctacttgctttattgtgtggaaaggttggaattggaacatgaaaaattaataaaagaccaagtaaaatagattttcaaagaccaggtaaaagagatttccaaccctagttatagcttagaatgagaatgtgttataattattgtattttattgttttgtctgtggctttgttatatgcaactcaaatgtaaactgtgaagtggctttcattccaaaatttttgtattaccattttccatgtactgaacgaaccaagttgatgtaattgtcagtttagaaccaatgttagttactatgttgtaagattgtgaaactactttggttaggttctctgagtgttgtcaaatcataaacaaattgggattacaagcatgtaacttggtttgattttgcagtggtaaccaagtttcatccagcaactaaaaagacaattcaagggcaaggctaccacccattttacggtatcttatccctttttgtttcaatatcatgtccctatttggatctatgaaataaaaaagaatatgaaactgtaattagggtcttcatagaccttcaacttcatagacattccttttatgtgttttttcgtcttttggtttggattaaccttggttgacagtttggtgagtgtatatggacacacattcatggctgtttactaataacactaagaatgtcaaagcaaaattggcccgcttgatagcaaaagccatggatcataatggcaaactatctagctagcactgacatatatgtagttttggtccctttgataattatcttataacaataacaaaaagagatggggttggagtctggtgcatagttatctataatcacaactaactatgtaagtcttcatctagttgaaacatataaaatgtgggttttagagcactgaaggtcaaaccaagcatacactagcatggttgcctaaaatagatagtgtgggtacctaggtgcagggaatggagtggaaaacaactccctgcctcagatggttggcccaaggctaaaagggttaattttgagccttaggtgaacctaaagtgacatagtcaaaggattccagcttcgaaccaaagacttgaaattttacccatgatcaaggactacttctgtcagtctaattaactgtttatatatttagttttgtgagtattcaattccttgtagaccaatgataagttctaagtgttaatttcgggaatgcagaaaaagaattttcacagcatgaagctgttttatttctctgagtgataaaaattgcaggaacctaaacctattatatataaaatgagattaaagtagatgaacattcgaaattaatcaaactagaaactcaattttgggtagggtatgtttaaagtataatatcaatgatctgtatatattgataatacttaagacagttaaaatcagagtaattaggtgggcactaattttatctatcggactatactacaaaatagaagcatttaattattcaatagttttttttttttggagtttattagaataatgcaaagtgtgtcgtttatataagttgtttggccaattttcattgtcaagttatcattctggtttggctgaaaatttataagacattacattattgcatatatctccattgttgactgaaggaaagtgaggttcattaaactattaaagcatttgtgcctctgactttgaccacatggtacagaggataatagcaggtaaaaagggtctgaataaaaacgttaaaaagggtctgaacatgaaagcaacagtccattatataggtactttaaaagagctttgattaattggttctatctaatggcctttaaggacaacatgataaagatttttactttctttatggttcctagagtaagagaaagctgccgacagtgtggtcaataaggttttatggcgtttcatgctaccacactttcatttccctagcaagtaccatagttgttgatttgaaagggagctacatgaagaattacatgaagatcaagcaatgtgaagtcttggatgaagttttggctttcaacatgcatgaagccttgaagaagaaagtttgtgcttaaaagtaaaaggattaaaagcattctgatgatccaagctttgcatgcattcctttcatacacattttaagcattgcatcatataagctttaagtaattgttttaaaatttaagaaaaagctaagtgttttggaaaaatagcctaaaactggtttaatcgattaatacacttagagaatcgattattttgttcatcaagctttctggaaaataattatgaacacttaatcgattaccacgtcagattaatcgattatttgaactttagcatacttggaatatggctgtgtgactggtttaatcgattaccatatagccgtaatcgattacatggttgttttgaaaatatagtcacgctgccttaatcgattaccacttcttgtaatcgattatttagttcacttcatgttttgcatccatgctggcttaatcgattaccaataattgtaatcgattatattacacacatgatttttaacatggtctggcttaatcgattattatggactgtaatcgattattttacttaaacatgattttatgcttagtatgttttaatcgattacacgtcgggttaatcgattattttacccgttaactgaaatcaagaactttccaagaacgttttaatcgattacaggagcctgagaagcgcttttaatcgattaattctgttacagattttagtataaatagaacccttgccttttgtgatcaacaacagagagaattaagtacaaacatgatattttcgaattctgagcattgaaaaagctttctaaggattcacaaaggcattcttttgggttcataggtcttgcttccattgattcatctatgggtcactaaggatctagtgaagcaaggcaatctttcacaaaggctaaggaaacctgattctgcataattgattctgcattcatcctgagattttcattgttatgcatttcattcttggatcatcaggtgaattctttccttattctttgtgggtgtaaagttttctgttgtaacttttgatttggttgattatattgtaagtgggttttcttgcaagaggagatagtgtttctccaaggacagttgagtagtgttctcagtgtgggtgtggcttctaagggtctaatagggttttagatctctgaacttcatctagggttgatgaagagaagcttgtaattgcttgtaagactaatatttgcaatagtggaactctactctagtgttgagtagaagaaactggatgtagcctcatagggtttaaggtgaaccagtataaaacttgtgtgtgctttcctattcttcaaacttaattgttttccttgtgaattctgtttatatgttggttcttgaggcattacaagtcttggattgatattggataaagattcttgattgtttttgtgataaagatccaaagggcaaaaaaactctgattttgatttatcaaagaaatttttaatttactaaggttaaccaattcacccccccctcttggttaagtgtgaagtgttccttattttcacaatagttatttttgtgaataagaggacgaaaacacaagtatttatcaaaatgttgttattttgattgtactgcctaatagcttaacaatgaaaataaaatcgccaaagtccaaagataatcaatggtaattatatgacaagaattatcttgatttaggggttatattgtggcacttcaacatccaatatgatttgtctttatgattgcatttctgatatatagcatgaagaatttgatgcatataagggtggcttaaactttgaaaacaattaacaatataacattccacttgaacttttaatcaaagaaccataaatttcattataataataattgggaacttgggacccacactaagaaaaaagcaagttgggcaaatatcagttaatttttactagacaacactagcacaacatcatattggatgacatttggtctttcagtgtatatatataaacacacattttgatagatgaaatataaactaaggaatgttaagctgggaaatctagagttaaggtaaacaccatatttttttcctgtaaaagttgcatagtagagtatacaacagtttgctggcggttaagaagtccttgttaagtttataccttaggcttttggagagtcagttcttgccatatgacattagagcctctttgacaaatttgttatgggtttgtccttgctgcaccattcttgtaagttagaattcctacaatgtaaaatggaaatgcatgtgcactgtccacgcattaatcctaaagcgttcatgcttaacactgtgtttgataagattacatttttggtggagggacttgagcaaactttataattcaggtgtagaggaggattggtttaggaatagtattaaatggaaaatagggtctggagaaaaggtcttgttttgggaggatgattggatgaattctggagttcctttgaagtttaaatatcctagaatatttctaacttgtcagcaacaacagaacaatattctgcagatgggatccctatctaattcgaggtggatgtggaattttagatggaggaggtgttttatggagagtgaagtagcagtagtcatatcttttttaacagaactgcaaggtgtacaattacatggtcaggagcaggattcttgggtttgggagggtgattcaagtgggctatacactgtgggaagtgcttatagaatgctgaatgaggaaacaaatgctcagaatcaagaggaggtgtttaaagtcttgtggaagttacctgtccctagtaaagcttcctgttttgcttggaggttgataagggatcatttacctactaagaagaacttaaatagaagaaatatacctctatccgacatcagctgtcctttctgtagaaactctgtagaagacacatcacatttatttttcagatgctgtaaaatcctgccattatggtgggaatccctgaactggattaacactcaaggggttctccctataaatcctaaagaacattttatacaacatgcatattatggcttaatggttgtattcataaattctaataaagttgtaaactttaaagttgaatattcatatatagtaggcttcaaatttcacactgttgacttatttcaatgtatacacattaaataagtgtaaactgcaggatgaatcatccttaatctggattacaaatagtggagaaaaaaatctgaagctatcttctttctctagaattacaaactgtgagatttcttcccttaaatgtaactacatacaataccgtgaccttctttgttattaataaagcgatataaaaattggttcaaaaacttactcttatctgttcttgttttgtttcccttaatcttttgacaggctgttttccaacgttacttgcatgctgagaaggagtatttgtctttgtcacttatttacagtaacggaaagcgatcacttgatttggtttgtggcaatttatccaatttcattgatcactaaataattatttgttttcattttttgtattttcattattatacaaatttgtgtattgctattcagatttgtaaagataaggttgcgacagaagtgtggattgctggcctcaaatcactgatatcttttgttgaacgtggtcttcgaaaattgatggatggagtgatgggggtctcattcttaatgtaaatatactaacttgtgatttttctagttaattacatttttgtcacattatgtttcttgtatcttgtactaccctccataagatgtaaaggtgatagatgttagtatcggtttttttttttatcgccaaagataaatatatatatatatatatatatatatatatgcatatatatatatatatatatatatatatatatatatatataagtagagatcatagtacaagtagtaccattacaaaaacacctagcaccaaaggcaaacctgtggcaccttaattcatgagaagcatgaattaaagggccaaaggtctggatggattataggtaaccccaaaatacaggggaaaactagatacaaaaccctcccctaattacaaaagcctccctcaaatgttgaccaaaagtggaaggatatgccaaatcctttctccaagttcttaagccatgtccagcaggtgaagtgcgcgtcatccatcaatttaagattattaaaactttcattgtggaacataattctagttctatgcctccaaatagtccaggtcaaggctatccaccagattagccaggtatgcgaacaaaccccactgctgtaaaagaaccaaaaatttgactgaagtgttctatcgggtttttagagaagacacccgaaatatttccccatgacatggattctccctataacagcttcattctgtcacagctaagaaatagatgtgcagcctcctcatcattgttcctatagaaaggtcagagggtatcattgagacctatattcctcctgtgtagattcatctttgtaggtagtctgtcccaaaacaaatgccaggcaaagcatgatgctttggaggggatttttactttccacatgtccttcaatacttgatcttgctccacatctatccctggcttattatagaatctatacgcacctcccactgtgaattttccactcggatcagcctgccatttccatgaatcttgctgttgtgcttgtctaccacaatcctgtatgtcttctaaaaatttgaaagctgattccacctccccctccataaaagcccttctccaacgaagctgccactcccagccagaacatgatgggatccccatttgctaaatataattctgttgttcataagatatatgatatagtcgtgggtacttctccatcagcgataaaccctcattcctccatccgtcctcccaaaatagcatatttgatccacaacccacactccaagctatcccactcatcaacccgttccctgccccgttcaaattgcatgccagaccaagatccccccaccatattgattctcttgcagacctcctaggtccagccaggcttctccacccaccatatctcgattccaacacctgaacccacagctcattgtggtggtgaaacatgttctatatccacttcccaagtaaagcatggttgaatgtagttagatctttgatgcccaagcctccacggtcttttagttggcataccagatcccaccttacccaagccaactttttttggtcagcattcccaccccacaaaaatcttttctgaattctctcaatctagctaccaccttgttcggagccctgaaaaaagaaaacatgaaaatagcaatcgaatttaacactgatttaatagtgtcacccttcctccaaaggataagtgtttctatttccagcttgctaatttctgctcacatttcctgactacggaatcccacgtctcacatcgtcttggattagccccaatagggatacccaaataagaaaagggtatagacatcacactgcagttccaaaaagaagtagcattgtttgtccactgttcattcatgccaaaatacatcacactgctggacgtccccaaattgggttttattccaggctttcagcttctgtttgatggctttgagcttctctttgaatgcatatccccccaaccaatagttgtactaccctctataagcagtacagtcattgttagctttgatcttgagaaattttttgtaccatgacactcatcagtttatttacctcaaatgaagtggacttacctaacattatttgaatgaatccttgtcaacatttagaatagaaacaccttccacattttccttcattttccttttatttcattggtaaatggtggaagtaagtgccttcgtcaaacttggtttttctgtttgtgcatgtgtgagaatcattcattagacacagattatccataactatgcatatggctatcgagtttgtacattcaacttagttatcttcacatttctttctagatgatgacatgaaagagatatagttgtcagtagttggaaacggcttgcagactgcaatatcactgcgaagttctctggcaggtaatttcataaatcaattttatcttaattcagattaagcatttttatatggcattatcagaaatgttcattctatacttgatttggtgtgtttactagtttatgtggacccctcttaaagagtgaaagctacaggctcaaatgctcttcataactaaaactatacatatttacttaattactcctataagccgaaaaattagttgtgtttgaccctaaaaacttatgaagagaagacagtggcattaattggaagcatttttaaaatttatcaatgtattggctaacctatccattacgtaataactaataaaaacatatctacaactaatccaaatatgcaatatatatacaatgtaaaagtcactttctcataaatagtgacaattagtaaatagtgaaaattaaattaaaatgttaaatggtctcataggtctgccaagaaacaataaatatttaccatatatagtagctgtgtacattgtgacatgctgtccaatgtccatgatgacgatagccaaacacagtctaaaatttgagatgaacaatgcaagagcagtcatctcttggaacttatctcctgcaatgtcaaacaggtcttgtgcttcttcacttgtaatcgtctcctccaaagcctcagaacagagcttcatcccaagttcatgaaaatccaaatatctgtctgattcaaatcgaacatcgttctttaacagtttggcaaactgaattatccaatcctcaatgcaagcaaagctaacaatttcctttgcctttcccacaccaccactctcgagtgcaatgttaatgccaaccacttccaccacaaccactttaaatttctcaaaaggtggatcccgctgaggagaagattctactatgtacagtcacatagaaccattggatcctgtttcagcccatattaattcatcattagaagtcattgcgaccaaatcaccttgttggtccctgtatttgacaagaacaactcctaatcttgggaaatgctcatgaataacttctcttaactagaagcgactacaattaataggttgctcagtatatcttatatcatcaccaaaaataagtgtagctgttttattaggaacaggttcccttctaccattacttctttcctctataacttccttaatatcagccttcttctcatcaacttttacattggccttcttcttgttggacgtgttgatcttcttctctacaactacaacactgcccccatcttttctgtttgtcctcaaatttctcctcagtttgcttttctggaatttttccatctgctgcattgtcttccactttactagtagcaaatttactaaaaatatcatgggcccaagaactaactgggctcacacgacactccaataaagtccatgagcagacaacacacacgtgtaaaaatgtagaatatccctgtacacactgtttaagtcttgcaaatgcttccacaccaccacttgtcatctaagaaaaaaatgtacagaaagacaaaaagtgtaccagccattctctgtgctcttcatgactattgtcaccatcatgaaccttaacagctccagcaagtgttggaagcccttccgttaattcctcagaaatgaaccctttgtaaacacaacaaatcctcctcccccagcacacgatttggcctaaaatttgctgtgattattgttgcgaaaaccgcacactacggcaagtgcaccggtcatttcaagtaataaaataggtaagtgagtatcgtctcctcagggattgggttgaaatttacaacaatattaattctaagtaattggaagtaacagaaaagaaattattttggagaattgtgttgggtgttgaatgtaaaactgaaattaaaataaacagtaaaataaattgaaatattaccaatggaagaaacaattgtggtcaggcgcaatccctaatgttcactgcctcttttactcaactgggttatcaagtttgatcacaaatgatacatctttcctatttttgtaaatcctaattccttagcaatttaaccctttgacaacaatcctaattccttagtaattcttatcaagcatataaaagactatatcataagagttgctatttcttttgctcagagaataaatctttcctactttagttaatccctaattccttagtgaattaacctttaacctgaatcaaagacccaattccttggtgaaatctatcaagttaagcatgtaaaagactatattataaagttccgcagtcacgcatccctatccctaggtgatgaacaactgttattttactaaggtcagaaattagaaccccaacgtccccattgcgaatcctaaccctcaatacctaaattgaatgaccaattctaaataagaattaaacaatgaagagcaaagtaaaataaagcaataagaattctcattaaataccagtcaagttacagaggagtttacattagttcatgaccttcccacaatgcaaagtttagcctgacataggcttcaaagacaccaaagctgtcaaataaaacattattctgcagtgacctagccttgattcttgccttccaatggtgtagaatgatgtatagaagtgtagagaggtgtggaatggtgtgtaggtgtctttttcttcagtcccattggcctttatttatagattgatttaattcaagtaacaaagcctattttctgtgccaatttcgaactcaatctttttaattcaggaaacaacgccttcgcagcgcggctggcgcgggttgtggcgctgattgcgccagcagttcgaattcatggcactgatagcgtggatgtccgcgcagatcgcacgggttattcgagttgaaaggctgatccaggcatctggcacggatcgcgcaggacatggcgcggatagtgcggtggctttgatcaattggtgctggtagcgcggatacggcgcgactgcttcgagttgaatgcttggtttttctgtaatggcgcgactcgcgcggataccggcgcgatccgcgcgggactttgaatcttgttttcttctttatttggctttaaactcctcttttggccctgaaatacatactttagcaaagaatgagatataattaaatataaataacaattaagctaattctaacctatatttctatttatttgattgaattctaacctaaaactaacctaaaagtaagatgtgtttgcaacacatcaattatctttacctcatcataactgaatgaaatgaagggatttgcaactgagtcacgtcgtaggtcttctacttctttaggatttgatggttacttactatcatcatgcctttgtttggctccttggttttgtttttttggtgaatcaataagaaaaattaaaacaaattaatgcacatttaagtatattaaactctgaattctcaaaattaacataatatttattcccatttatatatattcatccaactattctccggaaagtaaccagatgttacattaatgagttaatacaatggaatgtcatacacaaaattatcaatacgttcactatctatgaataaccagatgcacaggcaatgaaaaacttaacaacgcatagcaaatttcaatcattaagggatcaaaagaagttagagctctaagccatatgaaatcagaaaaacaaacctcttgtttccatatggtcctagcccgaacaacataaaacacaagagtcaacagttcaatattcaccataaaaaaataacaacactttccaaatttcgaaaaagacacatatttataataaccatagtgcacacatgactcaaaagtgtttttgcacatagaaggtgagcacatcaccctcctataatggctttctttgcggacccattgaacaatttgtgtgtagacactactagtctcacactactacaaataacctaaatatttcctacatgtttggttgatgttgtctaatttgcatctaacttcagcaccattatttactttgtacgttattgctatcactaaatgatgtatgtatatctttatcactgtattaaataagtttgttttctggttttaggtgactgtttttaacgccattaccaccttaaaagcttgttttaccttcaaacaaacaacaatcagcaacctgcttcttatcgtggtcagccttgcaatcttcaacaataagggttaaattactagtcacaggtatgtctcctgtttcccagccttgaatgttttttacatgtgtgttcatatatccatattttggtttgtcatacatttgaatgcattgtgagtcaaccttagttttccgttcaagcttcaatgcagtgattaatgcgaatagcttggattaatcattgaattgaaacttgaattgtccgtttggacagtttaggaagttacattttatacatgaatgctcaatgtgaaagttaagtatggtttctttaatttaatgacatttcgatttattttattttgcgttgatctccgagtgcatacttgatcgggttgagcaaaacttacccctttcatttcgtgtacttggagaccaatgcaaaatgctgccgaaatttcgttaaattgaactaaccatagttaacttcgacattgacgattcatgcataaaatataacttcctgaatgggatagggctacaccttttcaacatgaagttgacatttgcattcatatggtaaaggtcatggatagaagttggatgagagcgtcccacattagtgacgagtacgaaaatggggtcgaacaattccttaattttaccacacttaatgcaccttctctgcatggaaaatatttttgtccttgtctcaaatgtgggaatggaagacgccagtcaattgacgacataagatcacatctcatatgtgatggcataattccaacatacacaaaatggatatggcatggtgaattggtagaaatgtcatctatcccaacccctgcgcctgttgatgtacacatagatgatcgtatagaagacatgctacgtgaccttggagaatccaattttcagcaagcccacacacctatgtattacaaagttcaaattgattcgaaaatccctttgtattcggcatgcacaacgtacacacgtttgttggcggtgttagcattggtgaatttgaaggcaagatttgggaggagtgacaaaagcttcactgaattgcttgttttgttgaggaagttgcttcttgaaggcaacactttgccaaaaaatcattacgaagcaaagaaaatattatgtcccatgggcatgcagtaccagaaaatacatgcatgtcgtaatgattgtgttttgtttaggaatgagtttgctgaaatgcataagtgccccacatgtggtgaatcacgatacaaagtcaacgatgacgaatgtagtgatgagactttcacaaacatgggtcgtccagcaaaggtatgttgctatcttccaattattccaaggtttaagcgtttgtttgctaacccacatgatgcaagaaacctgatttggcatgcaactggaaggaaaatggatggatttcttagacatccagccgattctcctcaatgggaaaaaattaatcgtttgtttccaacattcggtgacgacccaaggagcctacgactaggtcttgcatccgacggaatgaatccgtttggaaacctttccactaaccacagttcgtggcctgtgctattgatgatttacaacctccctccttggttatgcataaagcgaaagtacataatgttgtctatgatgatatcgggtccaagacagccaggcaatgatattgatgtttaccttgcgccactcatcgaagacttgacaaaaatgtgggttgacggggttgaggtgtatgacgcccatctgcaagagacctttactttgcgtgcaatgatattttgtacaattaatgactttccagcatatggaaatttgagtggatacagtgtgaaaagccattatgcatgtcctgcatgtgaaaaaaacacatcatttgtccaattgaaacatgggaagaagacaatatacacgaggcatcgaagatttctaacactatatcacccatatcgccgattgaaaaaagccttctatggttttcaggagaaacagtctgcgcctattccattaactgggcgtcaaatttatgatcgtgtttaggacattgtcactacatttggcaagacacaaaagaaggatgctaatgacaaatccctatggaagaaaaggtctatattttttatcttccttattggtcggatctggatgtcagacattgtattgatgtaatgcatgttgaaaaaaatgtttgtgataatttaattggcaccctcctgaacattaaaggcaagacaaaggataatttaaaatcctggcaagatcttgttgaaatgggtatacgtgaacagttgcatccaattagtaaaggccgacaaatgtatttgtcccctgcatgcaaatcttttgctttaactgtatgcaaatccctttttgtgcatcatctgggttggtgcagtaaatggtgaggcatgagtttgtgtggctgtctgttttcattgttttatttttaaaaaaaactaacaacgttttaaaaatagaaatcaacacacccttagaatatctatattatagcagtgattatgttgccaagtagagcaacattgaatacctcatgtccagaatcgtaaatatttcagtgctgccgtcatactgaatcttgtggatggactaacaaaggttgtgttcgaattccatgtcttcttaatggattagtcatgattggctaggcatttatgtcaaacttatgtcattggtgaatttttttttataatctgctctcttacttttgtacatttctacagcgagtaacaggcttatcaactcccttgactgtgagatcaatgtcacaattcaagtctgctgatgctgatccttcgagtatattgggtcaggtattgaagtgcatgatttgctgatcattgatgactaaccagtctggctttacaatatgtaggctaattgttcctttgctttctatccttgtcttcttcaaaatttaagattaatatttgtaccatgttagagactttgtgaagagatttgtaaccaaggttgtgcttggtgacaactaccctcaggtactactcacaacgttgattagcattattgtacaaatatgaatggtgaattatttatcatttgtagtatacattctagttctttcataagatagtcaaaacattattaacttcatcaaatgcaaaggaatcttcttagaaataattaactgaaacttttatactgagcagtgatctcactcgaaataatttcaatgtctcaattccaaaaagccttggacacctctcatcagttgtgactctgtaagtcatcattccctattcatctgtgtgtttttatcttgcttgctctattggtgaggcatgttcttcaaatgttaactaagaacctttgcaactgtctttttcattgttcttgctattgactttagttttcataaattgtaggtgtaaaactttttacattgttaactcattagaaatcaccctagataaggctttggtttttaagcgaggtaaatggcgcggtgtcatctatgtagccgacctcacttagtggggtaagactttattgttgttgtggtcaattagaaatcgccctggatatgagttttaaaatacttattacagaatcaattatcttaccatatatgacaacctataattggactcattcttagtgtaaaatcttctaaactatcattgcattttaattaaaaacaaaataatcctaaatggtgtttgcatgttccctcacagtacaattgcttcatgcttcaggtcacttttgggaaatcgacttactagttcaatttcctcagaaattggtgacatggctagtctgcaggaactgtaagcgtttgagaaaactatgctgtcaattgattaaaactggaggtggaataattatatttgtaatccatgtttacagcaacttggaagataatcaagttgaagtacctcttgccccgagccttggaaaaatgagcaacttgctgagattgtgagactatttgtttcatttttgtaatttcatttgattgacataatcaatttgaatcattaatttgtctccagattatctgcaatttcatactgttttctccacacatccctaactccttttttttctcactttaactaaatgaatctgcagacttctttctacaaataatttcacagggataataccagaaacatatggaaatctaaagcacctcactcagttgtaagtgatttaatgtgatgcaatttttcccccttagtctttattttatgtctgttaagttgtgaaatcacacaacattttctgcatgcagtaggatagatgggagcagtttatctgggaaaatacccagttttattgggaactggaccaaaattgatagattctgagtctaaatttggattcatccatgaccttttctctgttgaagaataaaataaagttatatcatgattaaattacattgtattatccaagaaaagtttgttcttccaaggatttgcagggcacatccttggaaggcccaattccttctgtcatatctgacttgacaactttgacagaattgtgagcactttgtccttttaagagtattccaaattattacattttctgtgcattttacaatggtaatggaatgcaatgtcctatagtgtaacattttcttttcactaatgaaacatttatatatcaggaggatatccatgatgaagggagcaagtatgacatttcctaatctcaagaatttgaaacttttgctaagactgtgagttgaaaccttcactggtcttacgcgaagaactatataattcatttagggttctatcatatttctgttacttagggaattgtggaattgcttaataactggtcccattccgaacttttgatttttgtttttctttctttccctgctttttcattaaccatattcatttttcttgataaattattcactttcactgtgtctctttgcagttcattcactgttcataaactgtggaggaactgaaacaaagtttgagtcaatgaatatgaagctgacctcagtctacgtggcatttcaaactatcttcctagtagtagtggcaaatgggcttatagcagcattggagtatatttacgaaatgaaaaagctgattacgtagcaacaaatcagttttctttgaataataatggccctcattactaccacacagcccgcacggcccctctgaaggataatgactatggcctttgaatgctgaacgacaattataaagtgaaacttcactttgctgagataccattctctgatgaccaatcatataacagcattgggaagcgtgttttcgatgtatcaattcaagtcagtaatgaagcaaacaatttcttacattttttttattgtttctcctaaaatttttctcatattttgtatatggttctctaataacacgagttctaaaggtagatattttcattactgtacatggacagggttttaactatttgaaagatcttaacattgcgaaagaagctggtggagttggtaaggttatgactagggagtttaatgttaatgttacagacaacaccttcgaaatccacttatcctgggcaaggaaaggaactaatgccattcctataagaggtgtatatggacctgtcatatatgctatcactgtgaccccaagtaagtcgttttgataatattggtgtcctctctttcaaatacctagtcctttcatgttctgtaagcatttccactttgttttagactttaaagtttatgcacatgggttctctacaggaacaattgttgggattgtagctggggcatgtgtgattgtcatattgatactctttgctctttggaagatgggtttcctttgtctgaaagatcaaacagaccaaggtaagattaaagtccaaattaagcaggcagttagagcccttatgatttggtttttgatattaagttcagattggtttgcagtcaaccatgatgcatatacatctattagaatcttgtaacatactaatagacatgacttttttttataaatattaatattagattatataccaacatgaaatttatcggcaaagatctaaattgtggtaattttaaggtaacaggaaatgcacacttggttcctcaaaaacaattctctgatttctctctttctgtatgtctttcataagtaatattcaattatacattttatttcaaactagctatatctaccttgttgcaacacttctaggtctgaaaacaggttatttcagtttaagacaaattaaagctgctactaataactttgacctatcaaataagataggtgaacgaggcttcggaccagtatacaaggtaaatttgataggttataatcatcttaagcaatatgaagttttgaaacattggggttaagtctttttatccccaatatttttaaacgtctcctcaaaatcagttaatatagtgtgagtttatgttggtaatgaagtgaacacaaaagctactgaaattttatctaagaagagctattaagactttagtctaatgtgtttattctttgcaattttataacaacttgttataacttctaggataatcaatccaattgtggtggctccaactgttgctgctgtaggtttagcattcttcagctatggctttccaaaagttggaacatgcatggaaattagcattctgcagatagtattagttctattattcacactggtgagggacgacctaagcatttcaaccaccactgatatagtataagctcctggtgcatgacaagtctttaaaatgactgtgaagttccttcttgtatattaaaaaggctgtctgtttcgtctcttaaaaaaaattattggtttttgtcctttaaatggtttcagttgttatctgaaactcatatgttagtttcttttattacagtagtgaagcatcatcgagaaaattcaatttttggacaccatgcatgatgaatttatgctataagtatcatgaattaaaatgttcctctttgattttttaaaatgtttcaacgtactgtttacttctgcatggctcagaattcctgaccctttacagtgggttttccctattttccattttaggacttgcataatcatgggcatcgtgtcgctggttgcctctgtggattcagtaagtacattgttaaaatgcttgcaagtgcaaaataacagcctgccattatgaatcctagaacaaacagaataagaagcttgatatggcatgaagctttctctcctatttaagtgtcttcattggtaattggtacattctttgtgagttatcttaaaagaggtgccaatgttgacttatgaatgtcacattaggcagaatataaaactcaacgagatacttaaatcacaggactgtctaactagattgacaatgtcaaaagggcaaaaccagtgaaatgttcaagatattttgtatttaaattgaataaaataacataaatacacacacaagaagagaaaggcattatcacaaaggttgttagagaaatattagtgttacaatggtaaagacatatttttgcctttttaacaccagaacatggaattttaacttgtcaccttatagccattttttgattgacttgaaataccagattgtagcaccttgtcgagtaaatgattttgtatgtggtagggctactgaatgggtctccaatggtacacatctttaacttgttgtaggttttcgagtgaaattcaccgatattgacatgttgggacctttgggtaaatttgacttgttattgttgggacatcattggttgcagtgaacgttactgcaaatgccatttatgatcccataggttcaattgtagttggcaacttacttggaatggtaaagagggtttagatgtgctttattgccagccttttgaagtggtatctattgtattttaattccattctgaattcatcatgcaggcagccatatttattatccagagaaactaacatgctttgattggtagagttatggatgaccataatatggaaaaagtactttagtttttgaaaaaggacctatacaagctttttgctagtttctatggaaatcacataaattttttgtccttcatttgactaaggttaatattttgctttaggttgtagattccctctatgattgcaaaagtgaagttattgggcctggattcttcagaccaaccaggcagaaataggttcctatctcatctttgttatagaattaaggacatgaattatgcatcaaggtgctaagctgatcattgttaatgaaacagattttaacggagagatggtggtgcaaatatatcttaaaaggaacggtcgtgaagagtggacaagacaggtagatatgctttataatgttcatgtaaaacctctgataatatgctgctatgttctgctgctgttattagcattattcgcctatggctgcttttgattacatgctaccaaaataggaatgcatttcacttagttctaatccaagccaatcctaatataagtttgcgggttacaataggaagccaaattttgttaaaaaaatagtttaaaaatatataactcagtaaataaataagaatataaaataaaaacataatctcctatatattgtatacatgcaccgtaaaataaacataaataaattacaataatataataaatcatccaaatatctcaacgttaaaattataaataaaaaaatagataaaaatcacacttgaatactcgatagatcaattgggttaagttatgcaaattagtaactttagtcctaatcaaatttaatccatgtagataatttaaatgggtttgctattgggtacaactcattttgatattccaaagaacaagatatcacagatttatactgtcatggagttaaattgttggatcaaattatcataacgggctttggagtcctagtatataatctagctacaattaataacattaatattatttgattaattttagtcaaagaaaataaatgattattttcatgtggtcttttaaaaagttaaattcattcattctcattaacttaaggtattcatatatgtttaacttttcttttgtattcatctttttttggttgttgttgacttctttcactaggatttcagtttgattatgtctttgcttggaccattttcattgatcacaaacttcaactgatggtgcccatgatcgtgctacaactatggaaaggagaaatattgctacaactatgtaaaaattaattgtgtattgtattttcacatttcgacatacattttatgaataactatctatctatatatatatatgaaataacttggcaaaatatgtttgttgttggccattttatttaatataatttttaattaataaattaaaattatatgaaataactgaatattaatgttaaaaaaaaaaacaggtattcattgacgtaagtttcaaagacggttgatcttaactgacttcgtatcgtagtttctaagacagtcgatcttaacaaccgtcttcatatcgcacattcaaagacggttatttgaaaaatcgtctttgtatcgcacattcaaagacggttttgcacataaaacagtcttcgtatcctacattcaaaggctgttcttataaaataccgtcttcgtatcctgcattcaaagacggttcttataaaagaccgtctttgtatccaacattcaaagacggttcttatataagactgtcttcgtatctcacattaaaagacggttttgagaaaaaaccgtctttgaaaccattttgaaaaaaaaaacgctacatacgaagatggttgctatcaacaaccgtcttcgtatcctacattcaaacaaggttcttatgtaagaccgtcttcgtatccaacattcaaagatgattcttatataagaccgtcttcgtatctcacattcaaagatggttgtgagaaataactgtctttgaaaccattttgcaaccgtcttcgtatcatacattcaaagatggttcttaactacaaccgtcgttaaatgtattttattttattttatttttaaaaaaaaaaatttcagattaagacggttgttcaaaataatcgtcgtaaaaagctggaaacaaagacggttccataactgtcattgaaaaccataattttctactacgcaagattcgaagacagttcaagaaccgtcgttgaaggcataaaacaaccgtcattaaagacctgctatgtagtagtgccttaactcttccattggatcggatgcaggtagttgagtatgcaacccattgaccgaatgaatatttgaaagccatcgtcttatttttcaactcctaaacaagccataaacatatataatatcgtcaatcaatttcgttttttacaaagcttctcccccaaaacacacaacctatcaaagttatttaatagctttgttagatctcttaagattatatatgtatacactactacaaaaatgctattttaagacggccaatttaagacggttgcccattaaccgttttaaaaggaggggcggtggcatttttgaaattaatagcaacatttcaaagacggttcccatttaaaccgtcttagatttctgaaaacgaagacggtcatcaggtaaccgtcttagattctgtgttttcatagacgggtgggtataaaaacgtcttgaaaaatgggttcaagaaaaggtgaaacgcagtcgttttgtacaccaatccggaatccccctcaccaaaaagaaaatcgaacccgaatcgtgttttctgccctaactctcattttagcttttcctctgtggttccctactctctcgtgccctaaacccttaaaggtgcagtccctctgaataccttgcttttgttctgcatctggtgtcctcagctcctcccatgaggcgcctcagctccgcctcacttcgaccattgaggtatgatccttgttcttgaccgtgccatttttcaacttaatagacattcagataataatgaatgtatacgaaaaacagttgggtctagcagaagatactagtatcccacaacttggtgaatcaatgttcgaatttcaacagtaaaatgaacccatgtttactatctgactatgtcttgaacactattgttttcatagaatgaaacatttggaaaaccaaataaaagataatgaatgtttgcattgattaaggtagaaggagaacaacagaagatgataacatactatttctctcattatttttagtctgtgtgtaaggtaaatttaactttctttttccctcaataattttccggcatttttaggtttgctccttgactggatcattagatgctactatatttctttgtccaaatgttatattgttgtaaggctaatttagttttaaatatagttaatgaagaagtgtacatgttcacatgtcttggtacattgctctgttactgtagtttacttattttcattctttattgccagtaatgagaacataagaatgcatttttcttgtgaatccatgaagtattgcactggatttgggtgtctagtgcttcatattaactccatatattcatcaccttaatttggaatgagattggggggaactcactctaagagagtaacatgaatcagaatgtcacaacaacacttgttaactagtatatgtaaccaaataagtttaagatttcagatccgtttctcccaccacaattgacaggtgtaaagaaaattgctattactgtttctcgtttaaaataagcaatctatcttcccctgaattatgttgttttccagcgcgtttcatgttgatgttatattttaagcaatgggacaaattgaaaagcaaatactgatatgctaaagtggagaaaatgggagaaattatgtacgatttatcagcaatgcatagatgggattcagtcaaacctgaaagcattgtacaacattgataaaatgaatgataaattccctggaaacccctcctatatccaaaaagaagcttgttgctttaacatatacaagtggtgacaattatttgacccaaaatgctcagcaaaatagacaccataagttggttgtagcgtgggcctacccacttacaagtggtgcctaaggaaccgtcgtattcactaaacatagaaatggataggtattatatgtctgcaaattagtataaattataaactctaagaaactttttgttattatttcaaagaagtgcaaattgacttgttagaaaatacacactttttaacattatgtacatgccatcactaatctatggtttcataatcatttggtactttgtgctgatgcaatgaagcctagtgtttaactagattgagcatttgtcttctaactcttccttcaccaattctgatacaatcacaaaattgtgatttcaattcaccttcgatcaataggaaattctgaataacatgcactcttttcagttgtgatttcattgtgaattgcttatactagtttgataggcaaaacaacctcaagaagcgatataaattcctattcctgtacttgaattttttcttcttttcactaatatgaatttttgttttaatgtagctgttcctttgtctatcgatcacaaacctaatagatctgatgaatgtcaaaggattgaacaggctgggggaatcataatttgggctggtaattttcttcctgtatgggtgtatgccatttttttagttcatacttcataataaagtgatgataaataaatttcttgcactgctgccggttgatccaggaacatggacagttggtggtgttctggctttttcccgtgcatttggagacaaacttcttaaggcgtatcttgttgctgacccagaaattcaggttgccaaaattataagcttgatcacccacttggtatatctgtgttgttatttgttatgcttgctaaattgctccttttttgttactgttatggcttaggaggaagacattaacggagtcgatttttatcatcaaaaaatagtcatggcctccgcaatgtcatatcaaacaaggtgagactatcttacttgttaaagttgggcctaaacaacatagatttctttttctttgtctacatttttagtagcaacatgaccttgtgaacttttattatttataatttcagtctcttgtttgaaagttttatgataatttttgttagtagctattgattgttttgcttactaaatgaatgatcttaaactccataccttttttattattcgtgaaatataaaaccattactcattaatttaatagcgctttatatattcataatcacatgtttcatctgttgtcattttcacggtacttatctaaggtacatggatgtatggtattatttttttattttgcatcaaaccttagttgtaaagaaaaaaaacatgtgatttaagagccttggttttctttctggctttctgtaagtgacaatcaaacccaagttttttagtattttcattttgagcaaaaatgatggtttgaagtttcagaacagttacatgatgaaccttttcctacatacccactccaatcagctattcgtacaatcagccttcaagggcattacttcttttgagtgggatgaacagggtttttttctattttttcacttattgggtgtcaatcgcttaagagttgaagttgagttagtttttggactttccctaaacaactaaatgtgcagcttattttttgaactttccctaaacaactaaatggcatatcttttgaacttgtggtagagattcgtcaacaagctgtgtatttggtacttatagacatccaaatccctaatatagtgtcgtgctagaaatagaatttagtcataattaaccaaataacatgggcaatctaagcagggaccattttttatgatctgaattggtgaattgggctttttttaccttaagatttatgttacagctttggaaaatcttcaatgtttgatctctcccttttcatctgtgttacagatagagcttactttgggaccacattcatctgtaactgttgggtggcataggaaagatcagagaaggtcggcctctggagaagtgaaggtacttctatgttttctgaaaaatattgttttcccctgtattatccatctttctaaacccaagaaattagaaaaaatataatagatcttgtattccttcctttcaaataatgcaaattttttataggacaacatagattcatcttttcctatattgaattaactctttctcaactcctttagtttggcacatgttcttttgagacatcagttcattatactcatcgtttttctcccaaatctcttggctgcattgtgggaagacttgtgaggtatataaaatcttattacatgtaaatttagattgggcatcatttttcagtttctggttgctaaaatgttcacaatgtcatgatattcttggcaaaggtttttgtacgttcaaatcttgactcaacccaactctttgtatgattatttcagttgtttgtttcttcactgtcttaatgaatgtcgtctcataaaaaaatgaattattgccatagctttctatgaattatttgagaatttattttagcttgtagcttatatatcaaattaacaaaacagcattgttgcggacttattcaatctatattgtatcctttcttgcttgagtataaattatattgattggaagacagagtgttagttgtagttacatttcatatgggactagtaattgtaaagctttgttgtggactcatttctgtgtcactgctaaacgagaatttagttctgctaaattcttattatagtgtgtacctattacagcttgttttgattctcggattatataacttagtaatattatgttgtgatggattatataacttattgatgctatttttttttatcagcaaagataatatgtatatatatatatatagatgagaatgaataacatagtacaagtactaccattacgttaaacaccaaaagccccaaacagacctatggcagcctaatacatgaaaatacatggattaagatgccaaaagtcagggtgggatttgggttaccccaaaaacaggggaatctaagtagtatacccccctaataacaaaagcctctctcaagttactagaccaaaaatggaaggatttgtcgaatccaagctccccatttttaatccaagaccagtaagagaacagtgcagcttccatcactttagcaggattgaagctttcattgtggaagacaattttgtttctatgcctccaaatgttccaagtcaaagccagccaccataatgaccatctatgggaagtgagccctattttctggaagaatccaaattgtgtgaaatgttgtctcggaatatcagagaaggcacccaagatatttgcccacgtcatagattcccaccaaagcaccttgattcggtggcagccaaaaaataagtgtgccccctcctactcgctgttcccgcagaacgggcatagggtgtcattgagatctatgcttctcctttgtaaattcatcttcgtgggaagcctatccttaaacagtctccaagcaaagcaatgaactttgctgggagctttgactttccacatgtctttgaaagtttcatcctgctccacttctaccccagcccatttgatatacctatatgcacttcctactgaaaattggccacttggatcagcctgccaattccacacatcatgctgataaacttgcagattgtgctcctgtatttcttctaaaaattgaatagccgatacaacctccccttccatgaaaggtcttctccacctaagttgccattcccaacctgaatctgttgtggagcccatttgctggatataattatgctgctgattggatatgaggtataatctaggatacttttccataagtgatacaccctcgttcctccagccgtcctaccaaaacagcacctttgacccacaacccacccgccaagatatcccactcatcagcctgttcgccaccccattcgaacgacatactaagctgaggtctctccactagattgactccctcccgaatctcccaaagcctaccagattcctccaacctccgtatttcgattctatcacctgaacctacagatcatcttgctggtgaaacattccatagccacttaccaagtagggcatgattgaatgaagttaaatccctgatgcccaaaccaccgcaatgacctaaaattggcacaccaaatcccatcttacccaagccacctttttttgatcagcattcccaccccacataaatctcttttgaatcctctccaatctagctatgaccttcttcggagccctgaaaaaagaaaacaagaaaatagggatggagtttaaaattgatttaatgagtgtgacccttcccccaaaggataggtattggtgtttccaaactgctaatttttgctcacacttcctaactagagggtcccatgtctcatatcgtcttggattagccccgattgggatacccaaataggagaagcgtagaggcataacactgcagtttaggaagcaagcagcattgtctgtccacgatgcatctatgccaaaagtcgcaaatttgctcttagcaaagttgattttcagccccgacaccagctcaaaacttctcagcatgaccttgattgttttgacattttctgtcgttgcttccccaaaaaatatggtatcatcagcgtattgtagaatgctgatatcaatctggttgtttcccaccttgtagccagcatacaagttcttgcgttgtgcttctctcatcaaacaacatgtgaccctcagcaactatgttgaacagaaagggaggtaaaaggtctccttgtctaagaccacggtgcggaatgaactcctccgttgggctcccgttaatcaatacagacactgatgcagatttcaggcagccttcaatccacataatccattttgaacaaaatcccagcctcttaagcatatagaacaggaattcctagctaaccgagtcgtaagccttctcatagtcaactttaaatgtcaggcagcttctgtttttccttctagctttgtccacgacttcctttgcaatgagtacactgtgcaacagatgcctcccttcaatgaatgcagattttttatgatcaatgaggtgaggcaatatctttttcagtctattagacagcaccttcgccacaattttatatgtacatccaatgagggatataggcctataatcattcaagccctgtggatcctgtcccttaggaatcaacgcaattaaggatgcattgccaccccttgggaatctgccattgacaaagaactcatccaaaaagcgacgaaagtctggcttgataacctcccagaaactctttgatgaatttgaaattgagtccgtctggccccgggctcttctcattgccacatgcccatacggcatctcttacctcccctgcttcaaggcttgccaccaaagcctcattatggtgctgttcaatagtcttgaaaaccacgccatccagcttaggcctgtcctgattcagctcctcaaatctactcttgaagaaggagacaacatgctccttgaccctattgggttcctctatccagcaaccattgaccatcattcctctcaacatgtttttcctgcgcttccaattaacaatcaagtggaaaaatcttgagttacagtccccctccttgagccatctgtttctggctttttgccttaatagtgagccattggacaaagcagccacccataactcctcctatagcagtttcctcttgtttacctcttcatcaaataagtttctgtcatcagcatcagtctctaatctgataagctcctcctcaatgcgcttcagtttctgttgtatattgccaaaatgggaattattccattctttcagtttttgtttcaaagctttgagcttttcttttaaagcaaaaccccccacccactgatcctgtttgatttccagctatcgcacacaactttcttgaaagatttatcctgaaaccagcagtccaacaccctgaatggttttgggccccaatccacctgtgatcatcttaataggatggggcaatggtcagagaagtttctgtccaatatatactgagtggaatccggccatttgtccaaccatgcaagtgaaacaaagactctatctagtctgcttttggcagtcccgtttggcctataccaagtgaactttctaccaacatagggaatttcttccatctccagctctgctatccactcattaaattccctcaacaatccaccatcctgagatctcaagcaagtccccatcctttcacttggtcttcttatattattaaaatcacccaatatgcaccataaacctcccacatgtgcatttttcagttgccttaagtcctcccacaatttcctttttaacgatgcctcacaagatgaatacacattcacaatgacaactttagagccatctgaaacccagacaccttccaagaggataaacccaacaacaatcaaaaaaagatcttaatctaaatatatctgttgaatttttggattatgatagacctcaatgatattggttgatccatgatgccaaccccacgttgtaggaaaaggcttggttgttctattagtattgtgtcttttacgtgttcaaaacttggggattagttctgatttctgagtagatgcttgtttcagttccctttagtactggataacgaatgaagttgctcatccctatactgatagcatctcttttattgtgttctctgtttggtatctattttattgtcaggcaatggcatcttacatgtatgctcaaagaagaaaattttaaaaccatcattagaattgaattgtaaggggaaaaagattaggaccaagttagtgctgttacagttggaagttttgaagcaagggcagtattaatatggatttttattattgattccaaattacttcatgtaaaattgaatcaatataccttttgtacgtattaaatggtgagtagaatctcttttaatgctaattttaactgatcctataatattttatgactgctaatgttgattatggcatcatgcatgatcactagtataattatcagccatatattttagctacccattgctagtcaatgttttaatttgtctgtgtgctatctgttttgacattaaaccatttgttgttgtaattcttcccttgaggttgaattcagtggtgggaggaagttatccaaattcagctcggtacgctggttgtatataataggaattcagataatgtagttaacaatttcttatttgtattcatgtttatatcttgtatcttttttttccctccctttttctgtgatcaagtcaaataatgtggtttaggcttaggggatgaaagcttgtattaactactgctatataaaatcaatttggtatttgacatgaaccaattaccccaaagtttttactgttgatgatggtaaatcagcagttttatattctttttttcttttaacatatatagcttttacacactcattctgcaacatccttctaggcttgaagcgtgaacaaggcttagaggctagagcaactaaatatttaagtgagagaaatgctaggaacacattctttgatacactcttttgaacacaccctttcttattggatgaaatttattgaaaatagtttttttttgtagacatcacatgctatttaatgattctctctcatgtttttaataaattgtaaccaataaaaaacagtgtgttaggaggagcatgttagagagtgtgttactagcactccttttcagttaaaatcaaatttcatcagcttcagctgcaatgtgagccatctcatcctcatcttgacttttgcatacactagatatcacacaagagcaactgcaccagtcaccagtccaccggcaaaagaacctaaatggtgtttttttacaaaatatttaccgataaggggctgtttcaaaactatttacaaaactggggctgtgtgacataaattatttaccaaaatggggctgtgtaacatgcctgaattaggcatgttacaacacgcccaaatctaggcgtgttgtaacatgcctaattcaggcatgttacagctgccccaatttggtaaataaggccccccgctccgcagtttcttcatatcttggcttccggtgttctctgtctctgctaaactgccaaccattctggtattttttggttttttcagagatttttgaagttgttttgagtgacgagaagcatgagttcaagtggcgattctatttgcgtttgaggggttagggtttgctgggcatggttaggttgtgtttagggtatggtcatgtgacgttagtttgtggttaagggtttagggtttggtgggcatgggacgtgacgtttgggctagggttggattagggttggtttcatggttttggttgcatggtttagggttggtgggcgtgttgaatgacgccctaaaccccaaacaccatgtacgcctgccgacacaaccctaacccttcacctgaatacccaacccctaaaccccaaccaatccctaaaccccagccaaaccctaaaccctaagaccctagccaaaccctaaaccccaaccaatccctaaaccccaaccaaaccctaaaccctaaacccaagacccatccagattagtgagttcaatcttttgctttagagcttcaagctcatgtttgcagagtctgcgaagatgagccttaatatatatggttggtcaaaagtttctttaaatcttgattctgtctcaaggaagaactacattaatcacgtacatcggaccgagaagctgttgggggtcaagtgtaattgagaaaggcatctcaaaaggttctacctcgttgcttctccaaatagtgggaccaagggggaagaccttcgttgcagttggcatatgctcaaagatcaagttttttttggatttggagcagcaatgtgtctgatggaaaagtctttgagcattgattcccttctctatatactcaaagagcacgttgttccactttaggaaaagtagcccaagatggatacttgaagggattaatacctggaaaacccttccttccatagctttgtaagattaaggttgtcaagttatacttgttgaaatatctgcatgaagaatgtgggagccaatatcacatttctccttccagactaaatctaggcgtgttgtaacatgcctaattcaggcatgttacacagccccattttggtaaataatttatgtcacacagccccagttttgtaaatagttttgaaacagccccttatcggtaaatattttgtaaaaaaacaccatttaggttcttttgccccagtccaccacttctattctaggtctcctacctcttaagggaaaaaggaaagccagtacaataagagaataagatggtgatgaaagtgaacaggcgaaaaagcactttggaaaattttcatatatatatatatatattatctgtgtgtgtgtgtatacatattcatcacaatattatttacatgcaagagtaaatgcaaaatggaatttcattagaataagtactagacatgaacctaaacattttaatatactacttcacattatatgtgcagtttctagcaaaaccataaatagtaaagtaattaataattagtaattacagtgagtatattaaacattgagtatgagttgggttctgcacagcctcttcactggcacagtttgaatctgtttcaatcaaacagtgaagtaattagtaattacaattaagaatagctgcaagtcatacttggaaactgataacaaatattgtgtcatcatcacattaaataaaaaacattcacaacaaactcattgtaatgattctctgcacaaaaagcaagcgaagcaatgctagaaagtaggccaagtaagaaccaagataaccatgactttccagggtgatggtaagtcttcattgttgtcaatggatttgtcaaatggagttacttgacttatctggcatttggtctaaggtgtagctatttattgaatgataaagcgggaaatgcctagattaaaccttgttttaactttgaaagaggattattttggccattgtttaatgaattaacagtacacttaataatttaggattgttagtctaaccacactgaggatttggtgcacccacttgcgcaatcaactgtggaataaatgctagattatgtggtttagatatattgcagggaaaattatgtacgagaatacatatgaactattatcaaatcatcatcagaaagtgttagttaagataactactaaacactctttattaccttgctctgtagtattaaattaaaaataagttaaaatatgtatgtaaattcttaataaatattcgaaattcgtgtttgttttctaattaaaaaacatttttctctctaataaaacaattttgtttttgatctttgattattttggttttagtctttggtgaattagtaaatttttgtttgttccttgatattttttttcattaaaagtatgaaggaccaaaatccaaataattgtcttattaaagatgctcatgttccttttagaatcgcatacacatgaataacacaatttatttttatatttctatgaaaggagttaatcaattatgaagatttagctattctgatgttcctatgtgtgcatttatttatagtttagtgaattaatttactgaagtgataaaaagcttcacatgctggttgctaatcacgtaatgaatcaagccttatgtgcttacattataacttgagtatcctaaatttaaaataatagctattctgatgttccagtgtgtgcatttatttatagttcagtgaattcattgagtgaagtgataaaaagcttcacatcctggttgctaatcatgtaatgaatcaagccttgtgtgcttagatgataacttgagtatcctaatttttttaaaaaaattcaatggtagttgaaattagtttggtaaaacctgggggactattagtttatagtacatgctccatggatcccgaatagaatgatgagagtgtagcagcatatcttgtaagacatctggtaagcattatcattgttcacttatcgtatttaaatatgttaatttttggtttcacatacagttgtcctttctaaatacttgaagttacctttagttgaatatgtattaggcaagctatatattgtgtatctgctttgttaatgttggttttctctttccaactcaagttctggttttctctttatcttctttgttaaaacaccatctgcaaccctcacatcatccacgaaactgcttgaacttccctttgctttttcttgttttagaccattcattgaactgggggtgcttgtattagaaacttgcttgttccctgaagtataaccatgactgctacactctggagctgacctctctcgttggttctgctgtgaagtaattgtattggtatcaaatcaaacattctcctctggcttagttggcaacaactttttcctcttaattttctcctgatcctaaaaacaaaaagtaaaacaatagtcgggaaattcaaccaaattctcatggatattattcattgtaagcttacttataataatttcctccttagttttttgttgcttctcagtaccccttatagttttgacaaagctaaaaccatgctatatactctcctcaccagtaccttcaatgtttttctttgcacatgtcaaaatcaccttaactgattttgtatctttttctgaataagtgtcacactaatatcttctcatatacaaacaggaccttatgatccaagtatccatttttctattcacatttcactatatgatctttggtaaaatatatgaccttggcgaccttaacgaccatgccaagcacatgtagtttccaattgcaattccatatacgacactatagtgtagagcacaaacaatgttcatgaaactctttccttggttaaacttttaagaacaaggtaagattgtgatggagaaaatctaatggttctctgttatcaaaatcttccataagcctacttacatattaaagtctaaaatcccaatagtcaatatccacagacagtaaaaatttccataagtctacttacattaaaatgaactaaagtacaacatagatttatcacttgagggaagggagtgcaagttactcagaataaaaagttccaggcacacctttccaccccttttgacaaatctttgcttttatgcattcattagcaagacaaccttagtaaatggtaaaataagggttactctgttaagaaacaaccttagtaaatgcctagccagtggcctgcaaaagctccctttctgcatgctctctaatccttctctgaagctcaggcctgaaatgcttgataagaccctgcactggccatgcagcagcatcacccaaggcacaaattgtatgcccttcaatttgtttagtgaactcctgaagcatatcaatttcttctaacttggcattcccaactttcattctttccatgatcgtccaaagccaaccagtcccctccctgcatggggtgcactgccaacaactttcatgcttgtagaaatatgaaagccttgcaatagcatccacaacatccgtagatttatccatcacaattatagctgcagtccccaaccctgtcccaacagcctttaatgcatcataatccatcaagatatcatcacatacatgctctggaatcagaggaacagatgatcctcctgtaattactgccaagtagattatcccatcctcctcgaatacctccacagtgcctctctatcaactccttcagtggaatactcatttcctcctcaacaatgcaaggcttgttcacatgccctgacacacaaaacaactttgtcccagcattgttcttcctaccaaaactggcaaaccattcaggcccatgccttagaatggttggagacacagccacagtttccacatttgtgacaatggtaggacatccatacaatccagcattggctggaaaaggcggcttcaatcttggtttaccttgtttcccttcaaggctctccaagaaggctgtttcctcaccacaaatataagctccagcaccgtagtggatatgacatcaaaatcatagccttagccacaagcattcttacccaacaaaccagcagcataatcctcttgcctagccttttcgagattgttacgttcattgacatattcacccctgatgtagatgtaagcagcactagccctcatttcgatcatgcatcatatattctacactaaaacaacttaaactggcaaaacaacttcaaaaatgaatatagaaaacaactaaaagagaggaaacaagcttcttgtgagttttaaacagttttttgatagaaaacaattagtagcctacaaattgatgcaacattaaccatataacttgcaacaagaccaagtttcatcagcaatcattacctcctattgtaaacttggcaaatgaatatagataaagcaataacgcaactctttgtcctggaagaaaaaatatcaagcaaataaaaaaaagagccaagagggaccaatccattaatagcttccccagaaaccttggagagccaagagggccaccccacagctacttgctcaccatgtacgtggttaggtggattgctcaacctcggatttggcttatgaaatttcacaacacagtatttacaaacaaaaaacttcacatataatactgccgacaacactatccaattcatagcagtttaaaagcatgattaaaaaaatattgtactattcagctcttgaattactatacctgaatattctagtccttcagagttctcatgatgtcataaagaagacccttgtgatcttgacataatttggacaagcgtgtgagtaggacttagcaaattgtccatagcaatagaaacagaatctgatgtggaagttccactttgtattgaaccaggtaattccaaatcaaacatatcttctgtcattgcacttggaaggaatgcagatgcttgagaacaagcagcaatttctgggccaaccaattcaatgtctatggtaattaagggatcccccaaaatagctgtcaactattcaattgtgtcatcacttctcttctttgtatgtagaagttccctgatcgtatgtatacaagattaagcaataacttagttagtttagtaaacacataaattgtaatcaaatgcacactatacatcagaaaattaatctccactctcataaaatgtatttcaacatcatctaatgaaagatctttgcttcagaaaaaaatattagtaacacatttccttgagctaaccaaaaaagatattattagaacaggataaatctagctaccttattagtgtctttcaagttccttgtctaattatatttaaaagaacacttagcaatccaactcaccagatccactgccttagtaaataaaaaaagaaatttcaaagcaaatgaactggcaataaaagagtatcgaattacaacacaagcatgttccaaaaattgaatggatagaaatgtacaacctggtatccgtgatgaaaaacagatccaccactttgccatcaggtgtagtagacaccttcactttgtgtatgatgagctctagctccctacaattatattttacgaaaacaaatcaacacacaaaattatatatttgagacaacatcaaaacatgtcaggactatttttaagtacatgtcttcactgtttttgtgcaacaacccatccactaacaagcagatatctgcctcaagaaaagctttattgagctttgttgttgccttaattaatccatcattgtaatttggctcagtgtcttgctttttcaaacctgctatcgtttctgaaaaacaaatcaattttatcaaatactcattaaactagcaaacatccccattatggctgcatattgcatttttctggataaagcatcagttgctttagccttcagttcctggtttgtatttgatctgaaaatcaaatcccagcagtttggaaatccatctgtgctgttcctcacccatacaattaagatttaccacaatcctccttttcaggacttacatgaacctctgaatacaagttacattggtaaaaattgacatttaaatgcacttccattaagccccaccactattgtaaatataaccatagaacaggtccacgcttaatcattataactaaaaaagaatcaaaactcactaccacttccacccctagtatcaaacatttgaatgttgacaaatcaattcaaaaacaaaacaaactctcgattaaaaacagtaaattaaactaccgtaaaccttggggaatcttcaaatcacttcaccagcagcaaccaatattttaagaaaatgaaagaatcaaacaaaattatcaacaaatgctgaagcaatgaacacatatttgacaattttcaacaaatcattgtgtttgctgaaacaaaagtagcaacatatatagtaaggcagacatgttttgagtaaaaaaagtaaagtcagacacatggtcaatcattggtgtacttgaatgttataatgcagagcccatcataatgaaaatgactgtgcactgatttcccttttaccttattttgttatatattaaacactatgcttgatacttaattgatgtatgacagagtgttgttaccttatttcagtaccatgtctattgaaagtcgctttgaaaaccttggtcctatcacgtgcaacgtgttcccttatagacaataacaacgcactcacatttgctgtttacaacttcatgtgtctttaatgtttgccatgacaccaattctaagacctaatttttttaatattcagaatatcaatttctatatacatatgtctaacatagtattaattatttgttggttgttgttttaggtggtattttggctcagttagaacgtaaaggcgtcttttaacttattgttacttaacgaagcaaaaaatcgttgctattgtcgccctcattggactttggtcctatttattggccatattttgaggtatgtccctttttccatatgttatgtgtttacaacttgctttgttcattcctgactattgctttgtcacaccatgcaatgcattgttagtcaaccttagtttcccgttcaagaatcaattcaatgagtaatacggatagtttggattattcgttgaattgaaccttgaattgtccggttggacagtttgggaagttatatcttgtatacatgatttgtaaatacaagtaaagtatggtttgtttaatttaatgaaaattcagtgtaactgcatattgctttgatctccgagtgcatacttgattgtggtgaattcaaatcaccactttcatttcgtgttcttggagaccaatgcgaaatgctgccgaaatttcattaaattaaataaaccacacttgaatttacaaatcatgtatacaagatataacttcctgaatgggatagggccccaccttattaatgtttaacatatacatattcatgcatgtaacatttacaatatcatcatggcagctttttttttttataaaacatggatcgtaactggatgaaatcaccgcgcattagtgaccaatatgaaaatggggttgaacaattcctccaatttaccacacgtaatgcaacttctttgcatggaaattatttttgtccttgtcttaagtgtggaaatgggagacgacagtcgctgaatgatatccgatcacatctaatatgtcacggcatcattccgagttacacaaaatggatctggcacggtgaattgccggatatgccaacagttggaaccactgagcagtttgacgtcaacacaggacatcatatagaagacatgctacgcgatcttggagaagccaacttccagcaagcacatgcacctacatatgaaaaattacaaagtgattcaaacatccctttgtattttgagtgcacaactttcacacgattgtccgcagtgctagctttggttaacttaaaggcaagatttgggtggagtgacaaaagctttactaagttgctagttttgttgaagaagatgcttcctgaagacaacactttgcctaaaaatcattacgaggcaaagaaaattttatgtcctatgggtatgcagtaccagaagatgcatgcttgccctaatgattgtgtattgtaccgtaatgacttttctgatctgcaaaactatccgacttgtggggtatcaagatacaaagtgaacgaagaagaatgtactaatgaatccagcagaaacatttctcgtccagcgaaagtctgttggtatcttccaattattcctaggtttaagcgattgtttgccaatgctgatgatgcaaaacaccttacatggcatgctcatcgaaggcaacgtgatgaactttttcgacatccggttgattctccccaatgggcaaaaattgatcagaagtacccagcatttgcgaatgacccaaggaacctaaggcttggccttgcatcagacggaatgaatccttttggcaacctttccactaatcacagttcttggcctgtgttgttgatgatttacaacctccctccttggttgtgcatgaagaggaaatacattatgttgtctatgatgatagcgggtccaaaacagccaggaaatgacattgacgtttatcttgcgccattgattgaagatttgcataaattatgggttgatggggtggatgtttatgatggaaatctgaaagaaacctttactttgcgtgcaatggtattttgtaccattaacgactttccagcttatgggaatttgagtgggtatagtgtcaaaggccattatgcatgtcctatatgtgagaaaaaaacgtcattcatccaactgaaacatgggaagaagacagtttacacaaggcatcaaagattcctcaaactttatcacccatataggcgactgaaaaaagctttttatggaagtcaagagacacaaactgcccctacaccgttgactggccatgaagcctatgaccgtgtgaaggacattgtgaatgtgtatggcaagacccaacagagggatgctaacgaacgaaacatttggaagaaaaaatcaatattttttgaccttccatactggtctgatcttgatgttagacattgtatagacgtcatgcatgttgagaaaaatgtatgtgatagtatagttggcacccttttgaacataaaaggcaagaatcaaaggataatttaaaaagtcgccaagatcttgcagacatgggtatacgccaacagttgcatccaattagtaaaggtcgacaatcctatttgcccccagcaagtcacactttgtcaagaaaagagaaaaaatctttttgtcaatgtttgcgtagtttcaaggtcccacaaggatactcttcaaatatcaagagccttgtttccgtcaatgacctaaaattggtgggtttgaagtctcatgattgtcatgtcttaatgcaacaactattgcctgttgcaattcggggtatattgccagacaaagtaagggttgccatcagtcgcctgtgcttcgtgtttaatgctttatgtaagaaggtcattgaccccacacagttggatgatttagagaatgaggcggctattgtactttgtcagttggaaatgtttttccccccttcattttttgacataatggtccacttaattgttcatctagtgagggaaatcaggttgtgtggtccggtgtttttacgatggatgtatccaattgagcagtacatgaaggtcttaaaaggttatactaagaatcaataccgaccagaagcttccattgttgaaaggtatgttgccgaagaatgcattgagctttgttcggagtacatggattcagttaaacctgttggtatacctgaaagtcgccatgaccaatcaaggagaggaaagggtacacgaggattcaatgttgtaactatgagtagacaggaggtttcacaacctcatttgtatgttttgaataacaccaatgaggtaatgccgtacttagaagctcacaaacaacatgtggccaatagtcacccaaaatgaatatcatgaagctgttgcaagaacataacaaaactttcatgtcctggtttaaggaacaaatcttgagtgatgacaatgcttcttccactttaaggctgttagctcttgggccaaatttaaatgtacccacatggaagggctacgacatcaacaactattctttttacactaagtcgcaagatgataaaagtattgtgcaaaacagtgggttactattgacgctgactcgttacacttttctcgtgcatctaataccaacccaattcaagcgtccatgccatactttggagtaattgaagaaatatgggagcttgattatagtgcatttagagttccagttttcaagtgtaagtgggtaaacggtaagactggtgtccatcaagataatatggggtttactttggttgaacttgataaagtgggttacaaggatgagccgttcatcatggcagagcaagcgaaacaggtgttttacatcaaagatccgtgtgacgatcgtttttcaattgttttacaaggaagatcatctattagtagtcattattatggtgatgatgcatcaatggatatgtgtgaaatggcttgtttctcaacacggatgtcgtccatagttgaagacaatgacgttgatgctgaacatgcaaatcgggttgatcatgataaaggcttatgggagaacatcaatacttaattgctgactttcaaagtaaagtattttcaatattaaatgtggttctaatgatttgacttacctttaatattaacattttgtaatacttttatgttatatatctgacttatgtgattttggttgtttcattttacttgcagggtaatgtcgacacctccattatccccacccaattcacaacataatctttcaaagccaacgtctaggaaaactagacaagcgactcgactaagaagcttgactcgtagagacttcgatcagccaaggccaacagtggacgtaaatccttccactggccaagcatcaggcaataacaaagaaaaattccacagctatcttggagtagtggctagagacaaaattcctatagtccattcttcttgggatgacgttccagaaacattgaagaacctcatttgggaagacattttggtatattaactaggtcaatgtttatgagaaagttcagttctatgttatcatatatattgtaattggcaaattctcaaattttgttcaccattgtagggaaaatttgatatccaagaagcagaaaaggcaaaaaagaagatattgtcatcggtttgcacaagatggaggtcattcaagtctttattgaccacaagatacatatatgctgaagcggaaagccaaaatgataaagatccttccgttacatatggtatacatcctcaaacttgggagcaatttgttgctagcagaaaatcaccaaaatggcaggttagatggcaatatatgtttaacttgaaataaattattcaaatgacttgtttttttaatgtcgtcaatcaactacaattcgaaatgtgacagggaataaggaaaaaggctcaggaaatccaaaaaaataatgaatgcccccacatactttctcgtgggggttatgacttgctagaaaaaagctaatggatgaaaaattaaagaagcgagaacaagatgcaatgaatactgagaattcgttaaatttaaacgaccctccatctccaattcctagacatgtaaagtggaagatggctcgcacaaagaaatatggacacatgacatctaacactgccaaagaaatttccgataaaattgtgagctgaatcaaaagttcctattattatgttatgtgaattagatgttaatttgtagcttttatgttgtaggacttgttagaagaacaaatgacagaaggaatgtttgttcctcatggacaacatgacatattaaatgctgctattggacaaccagagcaccctggtagggttcgtgttgcagggacaggtgtgaccataactcaatactttggacatagttcacgtgcctcaagtggtactttaggatccatcaatcctatgcagttggctagtctaatgaaagaccttaaggaagaattgaggagagaagtggaggaggaaagcaaacaaagaatagaaaaaatgaaagttgaaatggaggagaaaaatgaaaaaatgaaaaatgaaaaatgaaatggaggaaaaaatgacacaaaaaatggtggaagcaataaaaacggagttaacacaaatggcaacacaaaaatccccccgggtgatgcacttttacaagaattggctgctcgtgttagcacaaagggaagtggtgttgaaactacagtgaatccatcaggggaagaacatgcagctgttgaggtgccacagatggggctgtttgtcaggtctgatgggtcgacaaagctagttgcgttgggaaaagtttacggtggaagctcctcaattcataatgtcacatatgtagatgatgtcatacgggtaactgttgaagaaatatatgacagggatgcccttgttccatatccgacataagagataacgtatgtaagagagagcctaaacacatttctcgcttggcccacacatttggttaaacctgtatcacagaaggtatatatgcatttaatgtttgtttttgttataaatatattaactaacaattggttatttttaattcatgtgaatcacataggatgcacacactagctcaggaaaaaaagttgaagctgttaataggtcatataaattgcaagtagctgatcgtttggatgaattgatgaagaatgcatatgaagtttaccataggcctatatggttgtcgtgggaggggtttaaatttggagttgctgctgtagaaacatcattcttcatcacacattcagatattaatgaaattatatctggtgacaagtatttgaacatttcaatactacaactgtggattatgtaagtaaaaggcctatacaatgtctcagttcatgtcctatttgtttgtaattgttacaatgtttatattaacaatttcaatttcacttaaaatgttaattataggtttctagatgaatggagtacaagcttgggatatagttcagcgtatgggttctttgagcctcaaatgatacataatgcaaaggatagacgttctgaatgtcaacaatacattcaaatatgggtcaaagaatcacaaagagaggtgtacctaggagcttatttgaataagtaagtaggaaactaatgtggtttcctaattaattgtagtttttttatattaagttgctaatatatatgaagtgcagtgcacattggcagctttttgttgtttgtcctttgacgcacacagttgtgtggttttgttctttgcgtaagaagcccgatattcatatcaaagaagtacttaacaagttatatcgaaaatttataattttacattatgaactgattatattttgacaaagctaaaacctcatgtgttaaccaagacgtgtgttgcatttggtaaagtagtgcacttaaggccttgaataccgatgttcatggtaaatgcaacgtaggtgcaccgaactggattgaactgaaggttagacattgagtttccacattcatatagcttgtgttgtcatattgtatatggaattgtgaaatttacgtttcaatgtttcaaaatttagagccatgtgcaaaatggaggttttgaatgtgggtattacgtaatgcattggatgtggaacatagtaagtgggggtttgaagaatgaatggaccaaggtatacgaagttcaacccatttgtatgtttagtttaatttgttaaattgttccagactttgaatgtagtggaataatttgtattttgacttattcttgcaatggttcagtgatggcacatcgttagacgtggacaccataacaacatgaaggaaaaaatgggcttcgtttttgttagaatcaaaaaacaaatcattgtgatgttgtcttgtatggtgaacggtgttgtttaaaatattcgcccttgtaattttgtgtaaaccagtagacattattaccaagttcgggttttttggttatgacaaattaatgatcaatttaattacatattttaatgttgtcaagcacaatgacaatcactcttgaacatcgggaaaagaactgcatacatatatatatatgtatatatatgtatatatatatatatgttatgtccatagtggaaatgttgatagttttgaaaaaaatgtttattccaattctatgaaatcatatacttcaaatgctgtttttcctttacaaagctatacaaatgagtatgaggtatcttgctcaggacttcccgaagtcgccaatggtgctacctcttcggaagtttgctatggtgcacatactttttctttgcaagattttgcaggtatgcttatcctgtctattgaaaatgtcatgtttgactctttacaactataatgcatttattttctatgtgctcatttttgtgtctcattttttgtgcctcggttggaagtagtagcctttctctcgctcatgatggtagacaacgatctagtaatggttactcctacaataaaaaggtgtgtttggtctttggcttcaattgtttttcatttatcattctgacagtttgagtttcagaatatcagcactcattggttggtgacttcattggtaagcaagcaagatgccaagatcaaagtttctgaaattttgcctagtttcaagtcatctaaattttatgttttgatcatcaaggattatggttggcttcacacgctatattgtcatactttctctatagtctgtaatttattttgtagcacttttctgattcttgttctgttcctgcattgcagttgtctaatctaactgtgcaattccgtattgacaaggccaacattgcattttttatgaatgtgctaggtgcatgacaatggaagtatggtaagcggagagagcagtcatcaaggtatctatttgtaattatgacattattgtttttcttccattcttatagtactgtaaagttgcaatatgcaagtgccaattgaatatttacacttagtttcattgctgaaatttttatgtatgcaaaatatttaagactaatatcaaggcagaaaaagagttgtaagattttactatggaagaataactctcgtaatgtagattgtggtggggcactagaatgatgatgcattttctacttatgatccttttgcattttcaggtgtacaaatggtcactcagatttctactggaagtgctgggggaaatgttttttctgaagaacctcgaccatggcttggaacaactgatgaagttcagatgcattcttcaaacaagttagggaagtccaaaaagttgaattcaaaacgggttgaagcagcttgggttgaaaagaggaagattgaaatggagaaggaaaggaggggagagtgtgtaaggaatgagtgtgatgccaactggcttcctaattttggtagagtctagcaatctggtagcagacgtgaatccagaaaagattttgagaaggagaaacagaagttaaatgttgaaacacaatatgagatggcaatcaagatacaaccttatgttagcaaaagaatggtgagttttattctatgatgaacattgtaaagattgctggtttagtatcttttaaaactgtcagccaaaaccaacttgctttttgccgatttaaattgcccaagcacaacttgttgataaatgggctaaagctcattataccaatctagcccagcttgcctaaaatggtgggatgtattcattaatggatggcacattttattttacttttggactcgtaaattgttggcgcatttttcttgggttggactcaaaggatagcacaaattttttaaatggttttcctgggtagcacatggaccagcctactgactactgagccaacagaagcaaattatagtatttttgtttgagtcttcaagaaacgaccaataaaaaaaacggtatacaatttgaacctttaagcctataacttagctatgatgctcgacggaggacagctaatcaaattgacatgttgttaattatacttctcatacttagtcaagatacttctttcaatgcaggaattcataagttggtaacactttttttttggcattacacactcttaaactgtaatgattgtgctaaatactaatctagtatatgtattatggacagatattgccaactgttccatggtacaaagaacgtctcctccttcagttttctcttggttccctcatggtcagcattcttatcagaactatatagtataatttgtctaaacttcgagtatgaatcttaatgcaagtgggatcattaatttaactactccacttatttaagcttccattttctgctttcttaagaagtttcatatcattagtacattggctaaggatgtgttgactgttcttataggtgtatatataaattgattgatgctgtgggttgtatttttttatgtttattattttttatgcaaattattttgttccattcttagtttgaaggtacttgaactcaagaagctcaaaacaggattgacttctgctaggactgtaaggaagggggagttaggatagttagaatattagttagttatagtgagttactgacataaataaatagtaggactgaaatggagggaactcattctgaatcaatgtaaattgagcattagctcttcctaaaaagagaaatcttgtgtgaaagagaaacccttcaaggagagctatctctcctattcctttttcatttgtaatcaagaaatacaatctttctcttgtatttctaatctgggttcctaacaggttgtgatcctaaactgcacatgctttttgtccttactatgatcctctgataaacaattgcttgcttaaaaatttaatctatattgtagaaggttatggattgatatgttcctgagcagcacatacatatattttaattcattttacattttgattgttgaacttgatagcagaatttccagtattgtgtttgtaagcttcaagtttgtagtaattacttaatgtttccattgatatgtttatatgctgtgctaaaataggatattgtgttgaattgtgataggatgtatatcttcatacaacatgcctggcaacattggcaaacatggcacctcatgtccaccgtttgagtgcatatgcatctcagagcgaagtcagcctctttgacatgctatcacgaaagtatgttgccagtctttctgggctttcataaaaaaactatgttcattagtcaccaaaaaatataaactatacatttcatatttacatattgaaatgagtgatttcttgtataatgttgattctaatgttgattatgattaggtataacaaattagctgatctcagagatgctaaggtcaatattgcagaaaacaactcaattgaaagaagtagccttctagaagatatggtttgtgatatgggttttgcgcttgtgtgattctattgattgcagacttctgactattcctttttctaaatgtatattcttttcatacagtcagcagagatgcagatatatactgacttcttgaggcttgtactagaaattataaatgcaattatgacttatgcactgcgtgaaaatcctgaggtacaatttgatgttccacttgattaattgcagattaaaatatgcacacctatttttatttgattctggacagatgaaaactacatttgcattctgatcttttacatcaaatgtcttacttgtgactgagataggtggtgtatacaataatgcacaagcaggaagtctttcagcctttcaagaatcaccctcgtttcaatgagcttgtcgaaaacatctacactgtatgtttcatgtatttcattgtaatcatattacaatatacacttgccctttaaaatcttgcaactttaaatagcagatttcatggtgtctaagatacacttgtgaaccttgtctttataaaaaaaacattatgttcgagtgtgttcaagcaatgtggtctatttggtattttgcaggtgttagatttttttaatagtcgtatggatgcccaaagaatgaatggtgattggtcagtcaatgaagtgctcaaagtgataattatgaactgtcaatcttggcgtgctgatgggatgaaggtaaaatgaaatttgtgtgattcgtgcttttcacccaataggtaataacattaggaggattacctgtcccacttctacaagaatatatcttgtttggcagatgtttacataacttcatttcacatatgaacaagagagtcaaccagaggagttttttatcccatatgcctggcagctagtactatccagatggtatggttccagagattcttattcacttcatcgtggctatttgtaactgttttgctcttattgtagtttgaactttgttgttcttaatgcatgtggtttccacttctaaaccgaataagattgttaccgaggtaccggccctggaaaatcatcattagatgtttttttttcttgagagcagtcatcattagatattgagatacactcatgggagtttattaattttatcaactaatttctatcttaatactttattttttgttgattcccttttaatatggttttctcattctgtgcatgttactaattcgaaagttctttcatattcagtggatttgaattcaatgcaggagctatacatttatttcctgctgatctacccactaaagtatgtagctgaatctccattatatatttatatatgacatgtcccttgtactcaacttatacaacttccttctgagttttttgtttttcaatccttccttgtagacatgtttgttgttgctgccacttatattactgttactatgatggaatggataaaagactactacgttaggaattttttccttataaaagagctacactactagaaaaataggttttaacatcgctagtttaacatcggttatcgagagaaccgatgttaacgaaaacgcggtggcaattttgtaaataagcgaacttatttaacatcggttttgaagatttttcgcaaaaccgatgttaaccatgaactgttaacattggttttcaatttttttagtataaccgatgttaaccacgaaatgttaacatcggttttgtagatttttaagtataaccgatgttaaccatgaaatgttaacatcggttttgtagatttttaagtataaccgatgttaaccatgaaatgttaacatcggttgtcaagattttaagtaaaaccgatgttaaccatgaactattaacatcggttttcaagattttaagcaaaaccgatgttaaaataacatattaacatcagttttttttatgggaaccgatgttgtccttatatcgccgcgaggattaaacttcagtatcgcgccttttagcctttatatcttctccttcagtccttcactctcgcgcccatatcaaaagctctgtcgttgtcgtcacccaccgaagagccccatctccctcgttgcccatatcgcacctcttctccttcgtgccttcgcgcccttatcaccttcgacacccaactcttctccttcgtgccttgcgccagtatcaccttcgacaccccatctcttcaaggttccgcgcgcgctgtcaccattgtcgcgcattgttggtgtcttgttgagtcgcgacctcatcccaggctttcggtgtcaccggtgacattgacggcagtcgcacaggctcaggtacttgccctaacctcagcttgtagagtcttttggtctgttctgttcgaggtactatgggaactcacatttcgaactaataagtcgttggtatttggtttttatgttaccgccatggatttgcaaagtaggaggcgtcatttggttgagaccgtggttcgcattgttggtgttagctttcacaagtacttgactttattccatgcttgttggtcttggttattcatgtgaaagagacaatgggtatctgttgatgtatttttgtttaaaaaatgttggataattgtatggacatctgctggaattggttttgtttggtgttaattgtttgtgctactggacatttaccatatgacaaacaagaaaggaaaaagaaaaacactatacatgattgctggtttgttttggtttctgttgtggtttgttttgactatagcattattgatgtttaatttattgtcactgttattatactaagtgaagtttgtatggctggttaaaaaatttaggacacttagtggctgattaagtaaacttgtgatgctattttttgtccttgttaagaatacttgttaagtatttatgttaggaataattgggagctatgttaggctgatgatgttggttataacataagtagcagcactggtagagtctgttttagtcattggattggtcaggctctcaaataatggtgttgccaagcaattgttcacaaaaaatggctaagttgatacttaggctcaagcttacaaataccaccttgtattcattatacagctgctgaaaatcaggccttgccccattgtttttgcatccttttcaggcggtgcaaaagcttgtatgcagaaggttcttcaggtattctattctagattaatgtttatgttttgaccatcatgctatacagtcttttagttctaacgtctgatgactctgttttcctttcatccagataattagtggctgcagctctgaagctcataatagggtatgtttcctgccattagtagttcagaagatggctgtgatacataattgtataattgataaagtcattattgtcttcaattttcttaaatcattttaatgtctgaatgaggcatacggtgttgattccataccctccattctgtttctgtgttccatgatgtaattgatcatatattcccttttacccagtgatttggtcaagtcaagttgttgttacatggacttatgtgcgttggacagtattttttgaccttaactcctgttctgacacagacaaaaaaatatgttcactaatagttttatcttttattttctttaccattactaaactattttgatggcacaaacttaacaaacactgaacaagatcaaagtcctaatacttagcctagttccttcccactcatcatcatcctagtcaaatgtttatacctaggcccatgaatagtaactgaaatagtggctgctacaatgaaaacaccagcattttgcacgaccatatcagtcagaataccagccccaactttgattagtaagcatgaagccgaagttgattcagtcaatcatactttaccagtaggttagatgaattacaaacctatagtttagtgatgtgggacaatatggagttgatggggacaatctcagacaggttggagaatatgctaacgatatcaactgtgtcagcatatactgcagcatcaagcagaatatcaactgtctcttcaaatgagcatctcatcattggcccagtatcatttcggttgataccatgacgtgtaattgccataaaatgccctcgataagtcatggtatcacaaagaataggcaaatgcctgtaattgacataagaaccatcaaaagaaatgacaacacgcaattcatccagaagagatcgccgaactgcctcaataccaagaacttcaatgacttcaatcaagtggttgcttgtggtcctggtggcatcaacatcttcatggcacattacagctagaaggttgacaccttcagtatcaagcatccattcctcattaggcttaaaaccttgattctcatcaaacttctgaactttagtattttttatgaaaaccttattgatgttagcatgttgctttctattttctttaagaaaacatcaacttcagcagactcatcctgaatgttgcccttgggtgcttcatcattcataatacggatacgaagtataagtttttcagcattgtcatcattaaatatacaagtcaaatcatcatcaaattcaatgttaatgttctctgcaatgtcagcgatactcaacttcttatccaccatcatttcacgattcagctctatgcgaagcaaccaaggtgaaattttttcacgagcaacttcttcatcaggcatttcatagtaggacttcacaaaatgaacgtcctcttcaattattgtactcatcgggtctggatcataccacacctctgtagcttcagtcacactcctgagagtggtatattctaaagcacactgcacactcttggctctctctttagtcttaccaacatcaggtctcaagtacacaaacaaagaaggcgttttaattctctttgccacattaatgatttcccttaacctacgaacaccaagactaacattctttgcactgacaccagcatagtggaaagtgttgagagtcatcttagtaacaggttctccaattgattgtgctgccatacaaccaatcatttctccagatgctacaagggactgcaagaaccttgattctttttctcccactacccacacaaatgcctcacgataaagcctgtattcctccaatacccttttactggcaaaagggctacggagcagaatattgaacaggagagtagcattcttctgagcttcttgactcaagagatgttaagcaggaacaaccttaagtcgctcatggagcttttcaatggcttccacaatctccattggatgcatatcagaaggcctttggaagtcaaccttaaatgtcttctgagcattccagatcagtctcttcaggtgaacaggcagtgcctgacaactgtcaccagtagtggctatctcagttgcaagttgaaatctatcagcttcaagcttttgaacttcagcctcaaacacattacgaaactctctgatggtttttaagtcttctacagcctcttcaagcatgttagtaggcttccagttttcagcatcgaattcatacctaaacaccctgtcaaattctaattttttaattttaagggaatccaacttctgtgtttcaatccaaacagcatccataccatcttctccgttttcatcatcaaattcagacctaaacatccttgggaaattctaatttttttgtcatcttaagggaatacagcttctgtgtttcttgtcattttaatatgaatactcccctaaatatgactaacatagcattagtttattgaatagcgcaacccttgacaatgaacgctcctataatgatgtgatttgatccttatgattatataaatatatatggtaagtattttgggataatgttgatattgtcatcatgttgtttgcaggtttacaaaaagattctcggtgacttctttcagcattacattcattgatcctctgcatctcttccctgcgtaagaacaaagacattttattataaaatattcaccacattgactaactttctacttctaatgcttgtattttgatttggctcagtcgcttgataggttcccattgttttttctcattcccatactttgatttggcgcagccgtctcaggtactatgattttaattgtctattgcaagagtagtaatgaaaggtattattgtgtatgaaccattattatttatgcacaaatcaatgcaatagggtagatgactgttcaccatcatttgtatgtagttttccgttgcctctgtgtaccatcatcaccatattcattgttggacattagcattcaccatcattttaggtacttacaaatgccttgcatctttttttatcttatgtatgtaaattgttttgtgccattaatgactatgtctatatacaaataatgttcattatgagtgaaccgtagtttcccgtttgagattcattaaagtgattcttccggacagtttggattaatcattgtattgaatcttgaattgtccgtttggacagtttgggagggcttaaatttttttagtatattcacatttatacgttgtcattcttgtcttaaatatgagaaaatttcggttcaatgcatttcactttgttctccgggtgcatacttgactgtggtggaactcatgtcaccgctttcatttcatgtacttggagaccaaagcaaaatgctgccgaaatttcgtcatatttaggataaagactcaacgtatagatatgaatatactttaaaaatatgccttcctgaatgggatagggccacaccttgaatgagaaaagtgaggttttcatgcatggctgaactttgtcagtatctcagagttggtaagcacatggatcgatcttggatgaatgcacctcgcatcacggttgagtacgaacaaggagttgaaaatttcttacaatttgcctccgaaagaggtcgacccgatggggatggaaaatatttctgcccctgtatcaattgtttgaatggtagacggcaaacactagaagacatacgggagcatcttctgtgcgatggaattaagaagacttatacgacatggatatggcatggtgagtcgacagacacgcagagggtctcggatgctaaacgggttaatgttgacatcggcgatcgactagaggatatgatccgtgatctggggcatgagtcttttcagcaagcacatgcccctatgtatgacacgttggagagtgattcgaaaaagccgttgtatccggggtgcaaggagtcattgacactgttgtctgcggtgttaaatctagtgaatgtgaaggccaaatatgggtggagtgacaaaagctgcagctcactgcttgaggtagttaaggacatgcttccagaggaaaacaccctgcctagcagttactataaggcgaagaagatactttgtccgatgggtatggagtataagaaaattcatgcctgtcctaatgactgcattttgtaccgaaatgaatttgaacaaatgcataaatgccccacgtgtggggtatcacgatacaaagtgaaggatgttgacgaatgtggcagtgatgacagttcagcgaaaggccctcccacgaaggtgttgtggtatcttccgatcattccaaggtttaagcgtctgtttgctaatgaagatgacgcaaaagaccttacatggcatgcagacggaagaaactctgatgggatgctccgacatccggcagattcagttcagtggaaaaagtttgatcgtttgtatccggagttcggcaacgagccaagaaatctaaggcttgcacttgctagtgatggaatgaatccgtacggtagtttaagtactcagcacagttcgtggcctgttttgcttgtcatatacaacctgcctccttggttgtgcatgaagcgaaaatacataatgttgtctatgatgatatcaggcccaaaacagcctggaaatgacattgatgtttatctcagtcccttgattgaagacttgacaaacttgtgggatgagggggttgccgtgtttgatgggtatcgaaaggagacattcaagttgcgtgcaatgctattttgtaccattaatgattttcctgcctacggcaatttgagtggatacagtgttaagggccatcatgcatgtcctatctgtgagcaacacacgagttacttgcaactaaaacatggaagaaaaacagtttacactcgccatcggcgttttttgagaccttatcatccttatcggcgattgaaaaaagcatttgatggaagttaagagcatgaacttgcaccgattccgttaaccggtgagcaggttcttgagcgggttgatgccatccatactgtatttggaaaaaggcaaaagaagcagaaaggtaatacatgcttatggaagaagaggtccatattgtttgagctttcatactggtctgatctagatgttagacattgcctcaatgttatgcatgtggagaaaaatgtgtgtgacagtgtcatcggcacgttgcttaacattcaagggaagacaaaggatggtttgaacactcgtcaagatcttgctgagatgggtatacgtcaacagttacatcctaggtccgatggtaaaaaaatttacttgcctccagcatgccacacattgtcaagaaaggagaagataagttcttgccagtgtctacgccgagttaaagtgccacaaggatactcttcaaatattaagagccttgtacagatgacggatttaaaactagttggattgaagtctcatgattgccacgtcttgatgcaacaactgttagccatggcgattcgagacattttgcctaagaatatcaggcatgctatcattcgcctgtgctttttcttcaatgccatttgttcaaaagtcgtggatcctgtaacgttagatgacttggaggaagaggcggcaattatcttgtgtcagttggagatgtactttcctccatcattttttgacataatggttcacttagttgttcatctggtgagggaaattaaaatatgtggaccagtttatttacggtggatgtacccgatcaagcgatacatgaagatcttgaaagggtatacaaaaaacctacaccgtcctgaagcatccatagttgaaaggtacatagcagaagaagcggttgaattttgttcagaatacctgcagaaagcaaagcctattggtcttcctgagttgcgacatgaggacagagtgggaggaaagggtacacgagggctacatgttataacgccttcgttgcaggacttgaatcaagctcatttgtatgtcctgaataacagtaatgaagtgctgccatatattgttcgtcatgaagcactacttcatcaaagtaatccaagaatgacgaagaataggctgttgaaagcgcataacaagactttcttgaattggtttaaaaatacaatatttcgtgatgaatctgcatctgaaacgctgaggaagttagcagatggcccaaaaagaaatgtgagaagttggcaagggtacgatatcaacaactactccttctataccaaacaacaagatgaaaagtccaccatgcagaacagtggggttagcctaagagctgagtcacaacactttgctactgtccgtgacaacaatccacgtttggcgtgcttgccttactttggagtcattaatgatatatgggagcttaattatgttagtttctctgtttgtgttttcaaatgcatgtgggttgatgtcaacagtggcgtgcgaaccgaggatttaggatttactttggtagatcttaacaagctagcttatcaagatgaacctttcatcatggcagaacaagctaaacaagtcttttatgtacaagatccatgtgacgaaaggtggtcagtggtcctgaatggaaaaaccattggcattaatgttgaggacgacgagtcaacccccgatacaagtgtcacacatttcgccacacaaacacctgacgtcaacagagaagacgaggttgacgatgtgcatgcaaatcgttatgatcatgatgaaggagaattaattaacatcagctcatgtaatttgttttgcttaagtattttggactttaacatactatttgttatttaacataacttgtcatttaactttacttatatgtattcttgttttttatttcaggatcatgaccacaccatccagctcccctgaggcaccacattgtcctcctgaggcagcagcggttcagcctgagacagcacctccagttcactcagcacctccacctcctccaccagtggctcaggctgagactacacctccagttcactcagcacctccacctcctacatcaaagaagacgagaaaagcaacacggctgaggtcactggctactagaggtcctggtgtggagaggcccgttgtccatgttgatcctagcacaaggaaggctgatgggcctcaggctaagagattgaggacatatcttggggtcgtggccagagacaaggtagatatcacccttcctaattggaaggaagtgccttcagtgtagaaggacttgattttggaggacattcaggtatgacaatttaaagtattacacaaataaattgttattcatgtaagttggaaactaacttctttgtaatgcaggctgagtttgatatacctgaagcctcagacgaaaggacaaagaagaagatacttcagacagtgggtgagcggtggaggcagttcaaatccgacttgacaaggaagtgggtccttgcagaagggaacgcggacgttgccgacgctatatgcgagaaatacggcatcagtcacgaacagtggacccaattctgtcagagtaggcgagcagcttcctgggaggttagtggttttaccccttttgagtggatatgtgttaaccagacaattgtctgcatgacaagaagtactgcataccaatatcgtacattaacataacagcactaaggaagcttgaactagccttctgatgtgtatggcatagccccaatccattaatgtttaacgtggtagaatgatttaggaacactcattatcacttgatttcctcatgttcatattctttgctgaagtcttttattatttgactgtaacttcatagtgcaatatgaggattgaaagacaatagttcaattttgtttgtaaggaaatgaaagatgatttcgagtgccctttagttctttgtatatatgtaacgtaatagtagaaggtagatgaaagcatgatagtattgatccataactatctctatataaccgtgtattttttcataaccctgtcttttttcatttatgttgtcatacagtcttttatttgctaactttacgtgtcaacctgttacaggatgtgagaaagaaggcccaggcaatccagaggcaaaacaccgcccctcacgtattgtcacgcgggggttacaagttgctcgagaagagattaatggaggaaaagcaaaagaagcaactagagggagcaactcgtgatgacagcacggagacgatcattcatcctccgtcccccgtgcgacgacacgtgaagtggaagctggctcgcacgaagaaaagcgacgacatgacttcggaggcggcacgccagattgctgagaggattgtaagtaaaacaatacaaatgacatagacatttagttatttttggtatcacaactaacaaaacaaatgatctactttacgaattgcaggattccctggaagagcagtccacccagggttcttttgtcgccagtggtcgtcaggatgtcctggctgctgccattggacgaccggagcaccctggacgtgtccgtggtgctggagttggtgtgaccatcacccagtacttcggacccgctgcattatcctctcggaagtcaaggtcttcatccatggcgcctgaggacttggatcgcctgaaagacaacatcagggtcgagctggagcagtctatcactgatcgacttacacagtcgatcacagagagagttacccagcaggtgatgatgagcttcagccagttgcagtctcacatccagactcaggcagccattcagcctccagaggtacagtcatgtccccttggtgcccgtgtcagcaccaagggaagctgtgtcgatccctcgggcaatgaccctgacacgggtgcatctgacaggcgtgggttgtgtgtggatggcaatcctccccgccttattgcccttggtagagttcatgagggatcgacgactgtgcacagcgtccctcttgcggatggtcaggtaaaggtgagtgttgaggaggttcgcgatccagacgctcccgtccctgttcccactgacgaggttgtgttagtggggcaggcacttaacactttccttgcctgggcgacacatcttgtacatacaattttgactcaggttttgttatttttccctaatgtcttgtagtttacgaatgatttgtcacatttgaatataacatgatcgctcacccttggttgttaactgtgtaggataaagaagaacccaagggaccggcgaaaccagtacacaagtcggaatgtgtttctgatcccttgtaccatttagcattgaccatcctcgatcttttcctcagacccttccaggtgccaggggacccggagatgttcggggtgcataatgacaacttcccgttgtacatcaagcatgaggatattttggagatcatccatggtggtcagtgtctcaacatctccgttttacagttgtggatgttgtaagtctcttgcaattgactagcattatttggtgaattgttttatcttctaccataacttactttattttcactgcataatagccatatgaatcatttaagtctgcaattcgatcaccctgatgtctatggattcctcgagccacagtcgatacagagatctggccaatctcaatttctgaccgaggactatatgaagaaatggatgcagacttcacagaaaaaagtctaccttgcaccatatttgaatgggtaaccataaataagaatcacaatttattaatgtatgcagtataataaccttgttttttacaatgcagttcacattggcaactggttgttatatgttcgaaggccaatgtagtcgtctggttctgttcgttgcataacaggcccaacaactaccttaaaggaattattaacaggtaggttctaatttctaacacatttacgttttttcttgacttgacatctaacttcaacagtatgcatacttgtttgtcttaaatagtgctttgaaaggtctggatgactctccagcaagtaaatcaaaggctacaacaaaatggattgcgcttaaagtaagtcctatcctaaatcatggtttaagtattcaattaatttttattcatgttcacggtatttgacatttaattatgactttgtttttcaatttagtgtaataagcaaacaggaagcactgagtgtggctattatgtcatgcattggatgcagacaatagtccagggagccttcactgatagctgggacatggtaattacttgtctaattcaaattgttttggtttacttatttttgttttgtacttattattacatgttttgttatgtcatgtcatgcatgcagtttttcaatgatcaaagaccattggaagcggacaccatgaaggcaatcagactcgaatgggcgaaattttttcttaaaattagacaagatgtattagtagattagggggttcatttgtatttttgaaaacaattgtatatatatatatatatatatatatatattaaattttagcttctttatgtacattgacacattacattggatttgttattggaatattattaaattgtgcactgctggttctggatatttaaattatgcattgctggttctgaatttttaaatttgcaggttgaagaactgctaaaattaaaaaaacaaataaaatatttaaaaaaaaataaaaaaacaacatcggttgccaataaaaccgatgttaacatgtaaatcaacatcggttttcaacgtaaactgatgttgtttgttgataacaacatcggttttgtaaagtaaaccgatgttgtttcttaataacaacatcggttttcgagagaaaaccgatgttcctgcattaaaacaacatcggttttctctgaaaaaccgatgttgttattaagaaataacatcggtttactttacaaaatcgatgttgttatcaacaaacaacatcggtttacgttgaaaactgatgttgatttacatgttaacatcggttctacgacaaaaccgatgttgacaaaccatcgtttattcttttgagcgttttcatgtacgacatgtccacatcggttattgatggcaacccgatgtgcttaacgtttgttaacatcgattggcagaaccgatgttaaattttcaactttcaacgtcggctgattcaacatcggccaataaccgatgttaaatgtctcaaataaccgatgttgaaagctgcttttctagtagtgctagtaggatcttaatttatgatcatacattcgtgctgattctgtaactaacttcttactctgaacttatctatttacaggttgtcaattaattgacaattaaatgggagagcatccatgatgtccaggtgaaggaccgcagtttaatctggtaattccttttcgtgaatgatgaatgttcctaatgtttcatggattatgcttgtttagttttaaagtttgtcggttatatattcacaatgtactgtgctgaagctaggaaagaaagtagaggaggtcatggccgtgaagactttaaggtccattctccctatctcatgaaaatttcataccattaacatgaatagggtagttgaccatattatgttggattctgcagcttagagatgatgagaactggatgaaacacacttgatttctattttctagtaggaaccttgatccttttaggtaatttggtttgatggaaaggaatgcgggtgggtatgaaatgaaaatggaatacttattctctgtctttgttttccttctttaaaaataaaagcatattgtactagaaaaaatataaaatacgaaaaaaggaattaaaaaaaaagacaaacaaagacggttgctccataaccgtcttagaatgtacatctactaagacaggtcttataaagaaatttaaaaaaataatttagatcactttctaagacggttatagcctcagccatcttagaatttcgaaacatactaaaacggttgctccgaaaaccgtcttagaaagcattttcaataaaaaaagtaaagtatattctaagacggttattcacatacccgtcttagtttttgcacattctaagacagttatgcagaataaccgtcttagtttgtgcacattctaagacagttatggaaaatagccatcttagaatatgctttaaattttttttttttgtaaaagcaccttctaagactgtcacagaaccgtcttagtaagtgtgactttctacgtcgcgtgatactaggacggttgtagaaccgtcttaaaatccccgctttgtagtagtgatatatatatatatatatatatatatatatatatatatatatatcatcatatttgctttattctaatatccatttcctttttcctcaattagaaaataacatacttaaaataacattttttttttaaagaaactaccgaggtactcatccacaggggcggaggcagactaagaagccaacaggggccaactacaaagaaatccaacaaatatacaaacattaaattccatataaaataattataattatttttttctaaaacaattaaaaatatataatagcaaatatactcatataatagaaaaattaaacatatttcttgggactcaagatcacaaatgttaatcgttaagttcccatgtcaagaatctttaatggtatctttaatgcttcttgcatgtaaaactataaatttatagttttacaatatttctatgggtgtaatttgaacaatttatcttatgtttacaatgtcatgtcataaatcatatattttggtctaataatataattttaaataagtcttgaattactaactattatttatataagtaaccggagtttaattttaactatttcaatatgacaagtacatcacttccaatgataaaaaaattaagtaatgatatctaaaaataagtaacttgttaaacaactaaccttaatttggagatgctcttgaaagatatatatgttgactataatgttttatgaaaatccctattaattatgttctaaatcataatagattatgaataaaaaactaaattataatggattacgtcattgttatattttatttaatgcaataaccaaccaataactactcagaaaaaaaaaaccaataactattgaacaagaatttgctttttattgttgaaaaataaaagaaaaagaatattgtatataaaaggaaaaactattaaaatgaaaataaataatattcaaatatttttttctaaaattgaaaattcaatgtaattatatatataatctttttatacaaagagaaatagtataatttgtctaaaaagagaaatgatctcattatctttacaataaatactatcaaatagaaatagaaaaatttgatttatgtcaaaaacataaaaaatactactacaaaaataacacttaaatgtcattatttatataattaagctcctttaaatataaataatcactctaatatttaaatattatacataatagcaatttttttcatgattaacataagaacaattttttagattaaaaagtcaaggagccaaggccccaagcttccatgtacctccgtctctgttcatcagatctttcctgttttcatgcatgttcaaaatacacctatatataaaattaaatatttttattaagacaaacataattaattaagttctctgaaatagaataaacagttaaagagtattcaagcatagaaaacacacacataatagttatagttatagtgtcacatatatttattatatttttttaaaatattttaaaaaattgttcaagatatctattatgtataaaaacataaaaggattttgcatttgttaaatttaaataatttaattattttacaactatatttgtaaataaaaattattaatttgtaatgttatagtttataaataatatttgaaataattttaaatataaaattaattaaattggatgaaaactattgaagtcaatattagttaaaataaattattattttaaactctaatgaacaatttatattaattagcactgatgtaatttgttgttataggtgtttgatattatcttcatccaatatatatatatatatatatatactaactattgagttttttaatgtagatatatttttccttaataacataatcatgccataacaactccagtgtttacacctaatggtgtattagcgagcaacccaaagataactttttgcaggagtgtggtctgccacttcctctcgttagaaagattcaataacttcattagtttggtgtaagtcatatgttatcttcaagtctcccacttcctctcattattagaagatttaatttgatataattcatatgttatttattttgataattcatttaagtcttaataaaataataaaataagagaaaaagaaaataaaaataataaagatataataaagataatttgaactgaaaatttaaatttatttttatttaaaatagttcttataataacttgatcgcacacgcatatgtgcacatatcacacatatataaatatatatagacatgcatgggttgagtgagattgaaaatttaatgaatgtaattttattagtgcgtgtcttatctttttataaccgttaatttattcaaaattagtggttgagattgtgtttcatatgtaccaacttctatgctagtcattcgggtgtttgaatcccttccatattaattttgtttttgtggtgtatttaatagcctactttttagattctttttaagttcaaacttctgatttaatttaccactttctaacatcaaaataaattaatacaagaaaacgcgcttcatcttgagaaaatcaaataaacattcataatatctctcaacaaactctgatgtctgtcagcaaatacaagtacagtatagtactacaaattataattattattccttagtacaattatatataattattacttagtaatataaaacgttggcttaattagccacttgatgataaatgcgaaggacatacctgaaacttttccaagcattcccaatgtccatctgaaagcaacaatgtcaggacaatcattacacaaacaacagccataatagtcttaacatcatgaagtagcagtacaactagcataaattgtagtccactacccacagcatatcctattatatattggtgctataaaacttatgcatgcatgcaaaaatccttgtttggattttcttccttcactctaccttcaatcaagcatgcatgcatgcatagtaggaatttcaccgtttttagcatttgcttgataacaaggataagtcattttactactattaaaatctctttcatgcaaaaacacacaccctaactctctcgttgtagcaaaattttctatttaactctgaaagaatcaaaggaatcagaatttctatctaacaccgaaaatagaatgtgaattcatttttctctcattttcccacacattttgtccaaacggaaggaaaataaaagagaaagaacattttgatggtgggattttggccgctgttcaagatctagctagcttccacagtctccattgttgtcgttgttacaaaaattacacagtaaataaatttcaacataaaagttagatgacttatatatggtcaaaagtcataaccaacaaaagcaattgaacaaaagcgctactactaaataaacatattatccaaaagagttgtttccctcttaattagtaccatgtcaatattagaattttttttgttttgaaaatagaagcaagaatactaggatactatttttatatattatttgaagggaaaatataaatagaatggttaaacaaaaatatgtcatataaaaaatgaggtattcgttcttatgttggtctaggccgaaaacaactaaacaacagtgtggattaggctcatgtatcaaaacattctattatgagctattgtgaatcatgtccatagatatataacgacaagccatcaacatatatcactactattcatcatgtgacctttaataatattcttttgtttaacgcttattaaaaatattattaaaattttttgcagcatttaaaaaatattaaataaatattaataatatgttttcataacatgttatcaaatgttgtctataatccatgttgctaaaaattttaaaggatttaatgatgagttatacataacatatgataaaatattacaaaaacatattaataatattttttaaatattgtcaaaagttgttagcaacatttttaacaagcgttagacaaaaatattgagggtgagtcctgacacaacggtaaaattatgtcttgatgtcttggtgacatatgcaagagaagactaagtacaatatctcttccccttacatgcacatgttgttaaagattacatatgttgtagtgcgtatcctagcttcttaatggttttgggtgcattgatttttaataatgtattgtttcttatgtgcactcatccaacacaacattctcatctctagattctctactttgccgagtttattctattgctagctttttatcactcaatactcagtttcatacaacattataagtcttatagttcagttgtcacgataaaattttccattaagcttgagtgataccattttgtcacataaaacattctaggcaccccttcatacgattttaaaaataaaaaaatcacaatataataatataatattacacaaaagaaatatttaatagagtataaatatatataatattataataatatgataaattataaatgtattattacacacacatatatatatatataataataataataatgatagagtttttgtctttataagtataaatatatatggaagataaaaaaatgtaaaaagaaaacaaaaggcttaaagggaatggagagaaatttgggaggaaaattttttctaagaaattgacacttgacactaagagggatttgttttctgattatattgatatagatatataagaatataagtttaactatggaagtaagaaaaaaagataaaaataaaataaaaagctaaaagggaaagatagtaatttgagaggaatttttttctaagagatagacacttggcactaagaagtgtttgttttcttagagcgtgtatagatatttatagaatataagtataaatatggaagaggaaaaaaaataaaaataaaacaaaaaagctaaaaaggaagagagggaagtttgggaggaatttttattttcctaacagattgacacttggagtaagagagatttgttttcttagagaatatagatatcattttctactttaaataagagggattatttttgaagtatactaactatatattatcttaaaatacacgaatgatatagcttgttaacatgtttcaactaatatatgtgtacacatatcttaggagataatataaaaaaaaaaaaaaactattttgagcttatgaatgtaacttatgaccttaagttccttctaacttatttcaacaaatttaaggtttatcaactttcaccaaaaaaaactacacaattaatcttattacttaattgttatatagtaataaacatttaaacaaataattggtcatgaattcattggaaacgattggttaatctcccttgatcacacacttcgggaagggaatcagtatgcatatgcactggccaagtttggtgcagagaatgcaagttcactgatggtttttcttgagcaacttggctttcttatcttatcccttcaagcatatgcaaagaaatctcaatttcctagagtttagttagtctcatttttctgcatttttttaggttatgtaaccaaaaacaaattaagcaatttaagttcacccaaaaaaaagtatgcaatttaagtcatctatgtaacaatgatatcaacacggtattttcgatacgtttccgatacgggatgtcgatacattacttcaaaaatactaatatttcgatacgttcctgatacgtcttagtattaaataatatattttttatatagagtgtatttcatatataataaaaggaagcgtagaacattaccaatctagtagggtaaggcccaactaagcctagacctatggatacgttgggagaagcagaaaaaaatagtgatacgattttgcgtttgccctaacacaagggagggcatgacggaagaactctctctctctctctttcttggtcttatccatcgcattgaaaagcaacatcatcaccacccccacttcttaccctttctttcataaatatgcatctatgcaacaacatgttcaccaccactagcttattcttcacatcagcctcatcatcttcttcaattagttggaaactcactaagaaagaatgacaaccaagcggcggtggaggagcagcgacagcgatggaggaagagcaacgacaacgatggtagaggagcagcgatagtgtggaggaggagcaacgtcattgtcgaagactttgaaactcttcaggtaagcacgaaatggaggaaggagagcacaaatcgaagaggtaagcaacacaatttttttaatatataaaaataccctttcaaattctgatacgtaaaaggccgtattttttgcgtacccatatcggatgggtgtccgatacgttggaattttttttttggcgtatccgtgctacatagtaggtcattgatgaaaacgtaatgattattattctatatatatttctcatcaacaaataaagtttcttacaatatcttagtagaaattgggtgacttggttgaggggctatgcaaaatatgttatcgtagcaagcgaaagtttattatagatgaatcaaatgatgagtatgatattttacatattttaccaagcgaaagttgttaatgcaaaaggaaaaaagtaacttataaagtttattatatgatatcttagcagaaatgattctgtaagttacttttttccgtttgcattaacaactctataagtttgatttaactcgatcttcgtagaaaataacgaggtagcgtttgcgtgattattgtaaccttgaagtggccttgtaactgagggccttggattgggcatggtggtcaaatttgttgatgagattgacgagttcagccacagtggttgggttccaactgaaccatggagcttcgctccttcttgtttacagttgggcacgaaaggaaataatttagtagtgacggttgttaacgacctaaaacaaataaaaataaaaagttgacgtgagggtattgtgggtactacttacagggaggtgataggagagaggtgagggtatctaatcctccagaggaacataaaaccgttgcatcaatatagtaacgaggttcacatgattcgtaaattaattgaaaacaattggtcaatctcccttcgacacacgcttcgggaagggaatcagtgtgcagatgcgttgaccaagtttggatatgagaatgcaggttcactggtggttgttcttgagcaacctgagtttcttatcatgtgtcccttcaagtgaatgtacagggagctcaatttcctagagtttaatttgttttgtttttctgctttttattatatcctgtaaccaaaaaaaagtaagcaatttaagttcacccaaaaaaaaagtaagcaatttaggccattgataaaaaataatgattattattctaccttatccttggttatatgcatgtttatcgagagcgccaaagcattaatcgatacactttatggagattatgggcttcaagcttacccattatcctagttacattgtgcttttgcttctcagatacctctttgatgagaacaattttcctgatatcttgcttcaacattgggatatatcttggtaggttaattatcatcacaggtccatgaaacaatattggttttgtttattttagagcaaaactaaaataaaattgttaatgcaaactaggaaaaatatcgtaatcatcatctgactcttctataataaaccttttcttgttccaactacatgttccactacagtcctttaccaagccacccaatttttgccaagaatataaaattctttgacatattgattatctccttaactttttgtcagttgataaattatatggtattatttcttcttgcttatgtgaaaattctatcttagcagaaattgggtgacttggttaaggggctgtgcaaaagatgttttgttagcgagcaaaagtttatcatagatgagtgagatgatgattcagatattttgcctagaaaatgtggtaaacctaaggggaaaaaataagaaaattgacagaaataattttgtaagttactttctttcgttgttcactactacaaacagggtctttaacgacggttattttaggcatttaacgacggttcatagaccgtctttaaaaccagtgtcgttgaaaaaaatatttttaacgacggtttttaaaccgtctttgtttcctatttttaacgacggtttctggaaacaaccgtcgtcgtttataatttatttttaaaaaaaataaaaaattggtactttcaaagacggttgtcaaaaacaacagtctttgaaagtatgatacaatgacggttacgcaaataaccgtctttgaatgttttcaaagacggttttagtccacaaccgtctttaaaaatgagattcaaagacggtttttatctagaaccgtctttgaaaactataatcaaagacggttcttgtcaacaaccgtctttgattctcacattcaaagacggttgtgatcaagaaccgtctttgattctcaacttcaaagacggttgttgacaagaaccgtctttgattctagctttcaaagacggtttttgatacaaccgtcttcgaaaatccaaaatgaagacggtttttgtgaataaccgtctttaaagataggaatcaaagacggttttctatacaaccgtctttgaaagtgcttatcaaagacggtttttgtgaataaccgtctttgaaagtcctaattaaagatggttttaatggaaccgtgaattttttttacattatttaatatatgttgatatatatttgatatattttaaatttaatttgttaataaaaattgtaataatatttcatatattttatacagggaaattttaataaaataaagtgataaaagctaaaaataaaataaaataaaactataaagagcataatctaaacttgcaaaatacaagaacaaaatggtaaagattaaaagtaaacatatataaccaagatacaaatataagaaatgtattttaacataagataattgtagcctaaacatatataatcaagtttatttactgcatcataatcattcataaatagacaaggaactacaaatgtcaattttacataaatcagctaattgtagcctaaacagttttgcctaaggaggtgaacttgaacctgaaaataatgagtcaagaaatcgagtttgcttatgacatttttttcctaaatcaagcatcatatagacaaaaacatcacaatattagtatgccaaaggtccaaaactaacatctttagcaatatcctctttcccttttttaaattttgcaagttgctgatgatactcttcaagctctttatccaacttttcaatgaactggctagtatgctcgatggactgctcatacctatatttctccaaggcctggaaaattttcacaataagatagaaatcgtaagtccataagctttatgctaaaagaatacaacccaattctttctcaacataatatattccccatgaaaaactatgaatcagcattttgcagtttttaaacttatccagtctatcaaaagcaccaatctttcatttctcagaagacaaacacaggcttacaagtttatctaaataaaagaggattaatctctcaatagaaaacaaaaaattatgaagttcagttcactagtgtacacgaggcatgtgagagagcatgctcaggtccccaacattactattagcagcaatatgttgaggcataaatccaaagtagtcttcaaacttctatagctagctttcttagtcaaatgcagtgaataataaatgaaatgagcattatgaaatactactgatctatattaaaagaggctataaaagatggaaatcattcctatcaacctaggttaagctcataaagattcaagaaaagatgattgtcataataacttgaattattttttttgagtggttttgatccgtggattatgtcaatcctctaatatattgcaagtttgcaacatacatcacactgtcattcagtcatgttcaactcaaccctcaagtagattatttctacaattctaattgctcaataggagagaaacatcattaattccgtgttactacaaagcattgcccatttcacatatcatagtgctaagaattttggaacctatcatgcatagttacctaacaaatagttacttcgtacatgatgaacacttaatcagcttctttctttatctccacgtacatttaaatctttccttccatgctattatatgagaaatgagaaatgaaaaaatagtaaatatttttaacataaggtcaaattaaataacaaagtaatataaaatagtaaataacagaataatattatttttaaaatagtaaatattttagtaatataaaataatttttatagtccttcattaaaataatttaaaggactcaacacgttgctataaaatataacctgatcaaagacaacaacatagacttgatgaagagaatgagaactgcagaactgattaatctcatgatgaatcttgtcatatatccatgtcttgtcataatgtacagctcagaagtgataaaaattgataaaattgataatagttaaagtaaaaataaagaacacatacagctcagaagtgaaaaagaactgcttcctagaagagtaggtacatcacctgcatttagagcatttccaagatgcatacccagtgatggggaggttgtatttaataacaattgcttcaaaagctttaccaagtgatccttttcaatgtgagaatacctgcataataattaattacaacaccaatgaaactattataaaggaggaagggttcataaataaagcagtataccaatataataattaataattaatcaatgaaggatcataaaggagatgcgatacaaaaatatacctctccactaatgtactgtaatttaaagggaatgatagactctaattaggtgataacaaacagaaaatggccaaaactctaattttgaattcatttatcaaaaaagaatacaagataaaacaaaaagtaacactttcttttgcctgcttgttcccatgattccactgtcccgagataaacaacgataattaccactcttccatcctatcacaccttcatcccaaacaactactcaaattttaattttatctcaaaattaagcaattgagcaagagacatgagtcacatgactaattagaatttatcagcagtaagatttgaacccatgaactccaactcaaagggaaaaaaccttaccattccacagaggcaaccagcgacactacgaccatgattatgcaagtcctaaaatggaaaatagggaaaccccactgtaaaggcaaccaacgaaacactgtcccatattttgaaaaagaattcaatatatatctcttttatttaaaataaaaaagtctctcacttaggtcttactcactgtgaacaaatccttaacaaaaatgtaaatgactaaagtcatttacattattcctcgttgctcaatcttgtaatgaacgacagtcctcacatcaggatcgtcaattttggaaaatgttttttgtgctaagtgcttttctgtggacaaggataagaaacactgatcagtgttagccgtacatgcagacaagcttgcaataggatgtgattatggactttcatggtaccctggtccgttaatcacatttaataaatattaatgaattgtttgcaatatattgacatgtctaaattttagcaacattctttatattatctttctaacactttaattaatgtttgtattaaaaattatctattttgaaaggtttcattttttatttaatgatgattttaatatatgttagttaataataaaaaaatcttacaagaaacaatcattagcattactcctaataaatattactttttaatattatatcgttaagatagtattcaagttagatccttgatataaataattttgataaacttaatttaatttcatgcaaattacaaattaattaagatctcttttcttgataaatcaaagggttaagagtattccaatatctttctatgcataccaagattttcttataatttaatatcaaaatcttaaattagcacaataatgtatgtgattttataactataaaataagtaattgttttagcttaattgatgattttaattaatttcaagtattgagtatataactatatttagttaatttattttaatttaaataaatattttaaaaaatatttattttaaatttaaacaaattcactcactaaatactagtcaaagaaagaacattgttacaaatattattttcatctaactcaagtataattacttgtcgtaaagcacatatatattctaaaaaaaaagtacgtgattgcctaaaaataagtacatgatactttttatataaataaaatatattatgtatactttatgtacgtggagtaaaaaaattattccaggataaaattcctacatattgagtcattactgcagtctaaaatgagtggctaaagttttatctatctatatgattatataatttaaagtgtgtaactttatatatcccattaaattttaatttcagaaaaggaaaaaaacaaaatagaacggatacttatttattttagaaaccaattaaatttactcgtggggaagtaaaatttgtttttctttataataaaagaagtaaaaatttaactagaaagttcacctgatcgaaagtctccatcaggattcactgtcatcatagttggctgtgaagcaagctgcacaatctatatgatgctgttgcatatgtaccttccaacaagatgtgtcaatatgataagataatatagtaagaatgttagatgtaacatatgtgaaataatatctatccatattacacagcacacatgtacatgtaacatatgtgaaatggaaaaagaataacaaacaatctaccggttcatgtgtgctcagcttcagctctgtttctcccattgcattactcatatcctcaagttcaacaagattgttaatttcctaagtttaaaggaagtcacaaagcttagaataatcaaagaaagaagggactagaccataaaacttgttgaagtatatcagagcacacaagagttgaattttaagttttctgagagaaacgtaatagcaacaaaggcataagcaaaataatagaaagtccaggcaatccagaaaaaaaatgagttatgaccgctgatagataattgaacaaagttaattgaaaagaaaaagtctagtggaataacaaattgaaaagcaaagagacctgcatacagttgttctccaagttgcttcctttgtaaacattgttggggcagagcaacgccaaatctctagagatgaagccagttccatccgtgagaatacgtggtttctcattatcaaccataatattgccatttgcatcctaaactcgcaataaaaaaaagaatctgcaagcatggccataaattataaaaaccataaggagacttaaaattgaccttaccttgcaatattcatctggtattttttggacactcacagttgtcaagtcaatgttgagtttcaaggtcttggacaaaatgagagagaacctgaatgcctatgaggttagtacattgcatgaaatgtattttgagtgggactgcgggaggatgcagaaaaatatatgaaactctaaatgatagtatttagtatttgcacaagtatcatacctagccatatacttgtccaaattgggcaacaacaagtgaacatgcatgaataaagttcttgcttcagacactgtctttaaaaactattcagttggcacaaaatatatcagtcacgagaggcttcttaactgtaaaatatattgtgaatgtggggtctcatcacacctagattttcactgtgtaggaagcaaagctttcctaagtggactcagaatccacccatggcatgtgaggctagctttcttaatgcagataaaggtcactcatgctggcttaagagctgcatatatctgtggaacaagagccatgactctgtcatgctcaaccacactctcctcttggttaaacatactgactgtatttttattttaaatatataattcaatgggttggatcactgattaatttttttggagtaagctcaccctcaaccgtctccaatgcaaggcattagaactttgcttcaatgtttccctcaaccgtttgccagcatccacatcaagccctcttctgagtcctccatattccaccactccctcactttcctcaatgccttggttgcagccttcaagagtgctcaggctcaccaacgccgcggttcgattgagaaccagcagcaacccattatggccttgaagattgaggtggagcagctcatagtatctatccttgatgatcctagcattagtagggtcatgagagaagctggtttctctagtgcccttgttaaaacaagggttgaacaagctgtttcaatggaagtttcttcacagcaacaagcttccaaggaaaacaccaccaccaagcttcaagttcttggtggtagcagcggcatgttcccatctggatcttttggtcaatttggggcatcattcaagtctatagaccatgttggtgatcgtttagatgatgtaactagtgttttgagtgaccttgtgagcaagaggagaaacacagtcattattggggagagtcttcctagtgctgagggagtagctaggggagtgatggaaaggttagaaagatggagtgttcaaggagagttgaggtttgtgcaatttgtgagtctacctcttgtatccttgaggaacattagcaaggaggaggttgaaaggaagcttgtggagcttagaaacctagtaaagcatgtcactcctcccttgaaactatttgggatcttcacccctttacagttccagttggtagcttgagccttgctttaaattttgataggtacgtagataattcagtcttctatatactattttctgctttgaatgttattattgtattctaattttagtgatattgaatttggtttttttttctttgtttcagttattttcatgttcagcagagaagcaaggtaacattcaaggacgaatcttttgaagaacgagccaaagtgcgcaagtatctaacttgctgcagagattgctcattgaattttgaaaaagaagctaaaagcattgctagtagttttactataagcaagagagattgcaccactagcttgccaatatggctcaaaaattgcaaggaagagagaagttacatgatggaggatcaggttattattaaaattaaccactcttgcttcaaaataataacaaggcatgcattaatttatgaatgaaagtgttgaaactgatgtttctgtgttttttgttttgaaccaggaaaatgctaagcttagggatatttgcaagaaatggaactcattttgcagttcagcacatggatttccgtccaatcttgtgaaaccatttttgttcatttcatcctctccctcatcccctacttcagtctcttcacatgaaagaaagcctagtttcaatctgagccacctaaactggccagtcatttctgaaccaaaagaagtacctaaagaatgtgagttatacactgaaactactgttagtcatgattcctatgaaggaaacttgataatgttcatgccagagaggaaccatcctaagctagaccttttgtccaatcctaattctagccccaattccgcttcttcaagagatgcagtggaaggtttggacagcactcaaatgttcaagggccataatgatgagaatctgaagattctatgtgatgcattggagaaaaaggctccacaacagaaagactcacaaaggagttaagttgttttgatgtatataaatatgtatgttattgaatattgttatgtgtatgtattgtaattgaattaactgtatagtgcatttgtgtagatggagaacaatgactggtactatgacattatgatgtcagaagaaataaatgtagaggaagaagatattgtctgataacccaaacctcgatctgttttattaggactcccctgttggatagcctttatgcagaggaatggcttacagttcagagacggcttcaccactaggaacaccttagtgccaagatggttagcagcttgttggtctccttcaccaaggtttcagatgggaataagttagaggttttctcacagcagctttgcggcatgagtagtgctgccattccagtcagtggaagattgtttcaaagaaatggaatgcagaagagtttttatcaatgaaggtttttaatcttttgattttttttaaaaaatgaaaagttttaaaaagagaaatgaatcaggccgtaggaaagaacagaactgccataaatggtttcagtgtggaagcctagggtgattgctgcaagataggccaaaacttctcaatggtggttggtggggctcaataaggtagcttaaggtcaggtttgagtgttgaagacctattaacttcatgttaatattataatttgaagcaactttctaaagattaataaaaaaaaataaaattaaaaaatcaacagaaacgcaaaggtgactagatggagctaataaatttttgtttttgggaactggacagcaaaatagtgatggaacaagtcatggaggacggtaccactctgacacaatgtcgaaggagagaaaaatacatgaaaaagatgcttaaacagtgtcttaattacaaaatagtccattttatataagtttattgcaataaatacaaataataataggagattttattcctacatacatgatatgatatgcctataaatcagattctaataatctgatcctaatcagatatccctataattataaagataatcaaatgatatcgtaagatatttttaattctaatagaaacataaatgaatttggaaaacatggaattggaaaggaaaaatacataccaagcatttcaaagagtagtttcaagcaggtaactgcatgtgaaaattcaagtgaatcaccacttatatgattgagtacaatatcaacgagaaagggatagcgttccaatatcccttcttcaaaagttaaaggatccaagaagccaagccttcacaagacatacgtaaaagaagtgaaatgaaactgttataacaaacatactacgctaaatatagatactatcaattttaaaacacacttcttacagtgatttgacaccaatccataaagacacacgatccagttgagttcttggggttgaggtctccaaagccactggcaaagcatctgcctctaaacagccaataaacttcttaagcaatggctgcaaaggttccaagtctgtaggtctcctacacatagacaaacatagatcatatcaaaaaggtcggaatccttctaaatatctcacagcagaaaactatatgtgaacacagtgatgaagacaagatccaacagaacgaacacttctcttgcaaaaaagtaatgcataaactccctggaagaaaatgagttcaccatttaagcaatctgtaacagtgaatctgctagcagaaatacacagcaagtcaaaatattatatcaaccatacagaccctgaaaacatacctcatacaaaacattaacaacttcagcattatcacaagagggattgtacttttcccctgctatttttgtattgatatctttaagatgaaatgtcaccctctcactgtttgctatggaaactacaccaaggctcattggatatgaaaccaacaaggcagcactgctttaataacaacatttttcatgcagaataaaagaacaacacaatcccaataatcacttattctcaattttcccacaactactactagtgtaaatggaacgcccagcaaccatcacaaggttctgaagcttggaaaaagggtcatcatcaaaacccatgtcagatttcacttaaccacccctctgcaccccatattgggctccatacaaggagataaccataacaagggtgaccacaaaggacaaggctaggaagagacccattacagggtgaagcttgaagaagtgatgaaaatggttcccaaatgatttgatcattctgacagggaataagggcgaatttttcgactttcgggttctttttatggtgttcctgagtctaagtcgaaatcggttcttgggtatgcggggaacgacttgggggcttgggacccaaaagggtaactgttcaatgctataaaataaacattaaacgtccattataggttctaacctaccaaacacaagacaagccttcaagtcacacaaatcgggaaacctagcagagaacatgtgaataaccaaatacagaaaccacaaacaagggaagcagaaactcgagtaaagagggttcaagggcttaccttcgctgatagtgagagggcttcgagtaaagtggcaggggttccgctgtgagagagagctcgtgagtcaaggagatgcagagagggagtgccggtgtaaaatagaagggtagggcacaaagtacacgcgcgtttttgtatatagcaatgttttcattttattttttaaatttgaaattacaaataaaacaaagacggttacccaaaaaccgtctttgtatggggaggaaacaacgacagtcattgaaggaccgtcttctttactcacatactacgacgggtttttagaaaacgtcgttgtaaactttgctttatttgcaaaaatgccaccgcaccacttacaaagacggttatgaaataaccgtcgtcgaatgcgcgtcgtaaaatccaccttttctagtagtggttgcactaacaactttagtgtaatttaactaagacttcatagaatagaatggggtagtgtttgtgtgattgttacatggaagtttcttcgtagatgagggccttgaattgggcatgcatgggggccaaatatgtggatgagagtggttagttcggcacgcaacgatggtccaattaaccatgaaactttgctcgttcccatgtactattgcgcaaggatggaaataatttagtagtgacgcttgttaacgacctaaatatttttttttttaaaaaattaagctaaggtaaagggagttgattgcgggtattaggattgggcaaaaaaattcatatctataaaaaaaatctatatctaattcaatctaatctattttaaatccatttaaatgaattagtttcgtatccaaatccatttttttggattttaaatccaatccaattaattggattgaaatggatatggattggatatttgtttggatttttaaatctaattttttttgtcaactttgattgaaactatttttttggtcgacgtcaattaatgatgattttaagccgtcatccttgagcctatttttcgattaatgttggtaaggtttttttagtcaacattgattgagactatttttttgccgacatcaatcgatgttatttttttgtcgatgtcagctaggtttttttgccgatgtctgttgagatcattttttatcgacatcaagtaggtttttcgctcgacgtcgactatggtttttttggtcgatgtcagataatactattttttggctgacatcggttgaaaaaatcatcgaccgtcatcaaccaaaaaaactagttgacgttagccaaaatatttccccaattgacgtcgatcgaaaaaatcctaattgatgccaacaaaaaatatccctcgctaacactagccaaaagaaatagtcatggttaatgttgaccaacaaatcctagttgttgccaacaaaaatatagtttcaaccaacatcagcaaaaaaaaatctaagtaacatcaaccaaaaaaaagtcttgacaaatgttggcaaaaaaatatcaatgatcgacatcggccaaaaaaaccttatcaatgttagccacaaaaatcccaaccaatgtcggccaaaaattagtcacgattgatgttgatcgaaaaaccctagtcaatgtatgtcaaaaaatgtaatgactaaaaatccttgccgacctcaaccaaaaagtaatcctacctaagatcgaccaaaaacattgaccaatgtcaactgaaaatgcactgactaatatcagcacaaaatagtcttagttgtgtcggtctaaaaatgttcgaaattaccttggttgaggtatgccaaaaatacactaaccaatatcaataaaaaaaagtctttaccaatgtcgttgaaaataactcttaaatggataggtactaaattttcactttttagcatttaataactaaaatttataaaaaaaaaaattataacatttaagtggatataaattggatatatccaaattcatatccatttaaatggattggatcttgaatataaattgttttttaaaaatatggatatggatttaaaatccaatccatttaaatagatataaattggatatggattggattcttaaaaatccaatccatgcccacccctagcgggtactacttatggggaggcgatacgagataggtgagggtatatgatcctctagaggtcacaaccgctgcatcagtacaataacgaggttcacatgatttgtgaattcattaacaacgattggccagtctcccttcgtcacatgcttcgagaagggtatctatgtgcatatgcaccgaccaagtttggtgctgagattgcaagttcactggtggttgttcttaggaaatctgagtttcttatcccgtcccttcaagctgatgatagttgttagaaaattggttgaatgtgttttgctttgaaggataggatagatagaatgtatgatgagtgagatagtagtgagaatattgggtaagtatagaaaggtgagaacttagtttacaagggaactagtgtttttatttttgcttgtttgcttgctcacttttcttgcttacataaactacaaggctttgggggtatttataggagtcttcacctcgttaatatgtggtctacatttgtttatctagaaagctctgttctagattattctacaactcctatgtctttctagaataatctacataagtacatttttttcaatgtctctagattcttctaaatacctctagattcttctcttaatttcttcaagcttccataagtttctagaaggttccataagcttccataagtttctagagtattctagaaatgtgcaacattttctaatactcctccttgatgcacatttccataactccaatcatatctcttagtaattcgaaccttgattttggtagtgcgtttgtgaaaatgtctgctagttgttatttctttgtttgcttcggcttccctaatgcaggattctttgtcattgctatagcagacttgttatcacaatatatatctctattgcttgattttgctgttctcccatgtcttcaagtatgtgcttgagccatatggtttgacttgtagttatagttgctgctatatattctacttctgctgatgattgagcaactgttgtttgcttttttaatgcccaagagaatattcctgagccaagtgtgaaagcatagcctgaggtgctcttcatatcatccattgatcctgctgtggaaaataaggaacacttcacacttaaccaagaggggggtgaattggttagtcttggtaaattaaaaatttctttgatgaaaatcagagtttcaaatcagagttttattgccctttggatctttatcacaaaaccaaacaagaatctttatccaagattaatccaagacttgttatgccacaagaacacacatgcaaaacagatttcacacatgtataatcaaatctgcagaatataaatcaaaacacaagatttatactggttcacctcaaaacctatgaggctacatccagtttcttctactcaacactagagtagagttcactattgtaaatattattcttacaagcaattacaaacttctcttcatcaaccctagatgaagttcagagatctaaaactctattagatccttagaagccttacccacactgagaacactactcagctgaccttggagaaaccctatctccacttagagaaacactatctccacttgcaagagaacccacttacaatagaaccacacatacaaagttacaacagaaaatctttatactcacaaagattaaggaaagaattcacctgatgatccaagaatgaaatgcatatgaatgagaatcttaggttgaatgcaaaccaataatgcagaacaactttccttagcctttgtgaaagaatagcttgcttcactaacaccttagtgacccataaatgaatcaatggaagcaagactctatgaacccagaagaatgcctttgtgaatccttggaaagctcttacaatgctcagaattcaaaaagatcaagtactaaatgaatctgtattattattttatcacaagaggcaagggttcaatttatagcaaatttcataacagaattaatcgattaaaagtgctccccatgctcctgtaatcgattaaaacgacctgggaaagttcaggatttcagttaacgggttaaataatcgattaacccgacgcgtaatcgattaaactagacttgaacaaaaaatcctgtttaagtaaaataatcaattacattccacggtaatcgattaagccagagcaagcttaaatctggtttgtgtaatataatcgattacattatttggtaatcgattaaaccagcgtgagtgcaaaatatgatttgaactatataatcgattacaatcaatggtaatcgattaaaccagagtgattataacaccccaaaatttagggaattatagacaattactaagagtaaaatgttaatgaaaggtagtagaaaaatttagggcaaaatgacaagaacgcctctgaacaatttttgaaatgacatttatgtccctagggtgaaaatgacaattttgccctgaacaattctggaaatgatcaatgtatccataggagaaattaccaaaatatccttggacaatttcataaatgacagataggtccctaaggcactaaaagaccaaaatacccctggatattttattaatgaccaaattgtccttaggcattttaacaagatacttaaggaggaaattctctaaatactctgagatgcctaaaaaataatcagaatacccttagggtaacaaatacagaatttccctgaatatttttggaaatgacgattttacccctagggtgaagggtaaaattaccaaaatgctcctaggtcaaaacttaccaagatgactttagaaaataatgggaacctaagcataggataaaatactcttagacaacaaataatcagcaaggttaagggcaaagaaccctaaaatagaatttatacgaattttggaagataagttgaaaagagcttaacctagactatctcgagtatcagaaaattagaggaaaaggatggttataatctatgaagttttttcttaattatagaaggaataggtttcctaaataagttagtatagtaattttagtaattcaaggcaaaatggaccaataagaattgagattaaactattacatgtaaaggaggaagaattggtggatttggatttctaaattaagccttgaccgtatgatacaagatcaatggaaaaagctctaagaaacttcaagaatggacacatgaatgtttaagaggcttaggaacttgctattggtccaaatggaaagctagtcataaatgcttaaaagatatttgaagcaaattttattttgtttccttgagcaaaaaacgtagacatctctaggccttatttcaaagatcccaacggtcaaaggctagatatgtaagttaggaatataccattaaaattttaagaaaatccaatggttaacgaacccataattgttattttacagaaacggatttttaagaaagaagtaaaacacaaaaatctttaaatgttggttactacatgtaaatggaataaacgccaacagaattgtctacacaaagcaaggtagcacgtgaaaataagcaagaagcaaggaaaggtgtggaaaattcatgaagaaagccacttggaagcaagaaattacttagccaatgaaaagctaaccaagtggaaagtaaaagcaagatttttagcacaaaaaatctcactaaggaggtggacgtgcacaagctcttagcagcaccttagggaaagcaattttatatataaaacaagcaaggaaccatggcatatggttaggtaagaaaaccaagaggtaaacgtgcaaacaccctagctttatactatttgatttctaaacactttcaacataaaccaaagggtggccgtgcccttactcccttgtgtatcctatcttcttttcatttaacctccttcgtcactttcccaatataccttttacctaagcaagaaaatcaagactcctaatcctaacaagttcaagtgggaatcaaaaaggaaaaagaaaggaagagttgttcaaatttgagaaagaaagcaaaggtatggggagtttatgatattcaaagtttgaataagattcttatatggttttgaaattaaaatgggataatagactatgttgctataatttggatgatgggctgaaatccttctatgtatctatatctagtttgatgataaacttggttggaaacatgttttattcctagaagaatgttgactttatagaaattaagtcttgtatacaagatgtttgatgaaatgcctcaaagaacccaaaaattgctacatgaaggataggtgattaattagtattaatcttagtcttagaaataattattgattaaataaactaaaaaactaacctaaccaatgaaatttaaagtgatttacaatttgaaaagtggtttaaaattgtttaatagaatatgttcctaagccttgatgtggccgaaattttctatgtctctttaagagtatatatgttgttttgatgctagaaattggtggagaacatgttgatttattcttaaaaatatgttgaactttataaggattaaagtttaaagtagctttctttgtattctatggattcaaggttgcacaccatgtgtttgataaattgtcacaatgaatgaaatatgtttaaaaggtgtttgtttgaatttttattgttggtttgatgctttactgttggatttgaagtgtatttgcatggctgaatatttaaaacaaaagttgtgtgttatttcatgtgttgctgagtgttttctataaaagcccaccatgtgtttgatgaattaacttcaagagataaaactgctctaagtaaatgaaatggttaaattttgatttgttctaagaactatatggagtagactatggttgtatgaccttatgacttatctgagaagaatttaaagaattgaactatggttgtatgcttgggctgtggtgaaaagctttatgtgatgattgaaagaagctttaattgtgatttaaaaagcaaacgccataagttgagttttgaggtatatgtgatttgagaaaaagaataattaaaagatgtgataaaacgaaccattcacgcattttcatatgcatatgcctggcgggggttaatccatggagttgatgccttacgggggttaaaccgtggagttgtgtgtcagatagttagaggaactgagtatgagtgttcagacactgaggagtctgagctggcggggtgcttcggcagtgaggaactcacgccacccatgatgatcacatgcagtgtgggtgactttcctgtgcaccactgtgacaccctgattgatcatgcaagttctggaccattgattggggctatctgactgtggccactgatgttgattttatgataaagctgagatctcagtcatgcatcatattaaaagatgagcatgcatttcatgcaccacatgatgagtatgtgaaatgattatttattgatgaatatatggtgagctgaatatttaatctgggtgctgtgaaataatctgtgaatcaattggtcttttatatatatcttattcaaactatgtttgtcataaacttacccgagttgtgtctgtggttgacacctgtgatgaccccaattcgtttgggctagcagaggaacagtagtagctgagcatggatggtggaatgaagatgtgcatggatgattggaagatgtgatgtcgatgttgtgatgcttgttatttgtggttcttatgtattttggactgtctgtatattattggacatgtattatggactgtattataaactgtatagtggactgtatcatggactgtactcttatttataaatgaaccgtggtgaggaaaaccgtttatactatttacataaaattagcaaacaaggcgaaaagaattttcgtgaaaaatttacaactaagatcattataacacaaagtggacacgaatttcatctaaaagcaatcaagcacgagagagtcaagagagaggcgttacaatggtggtatcatagtcaagagagaggcgttacagtgactgtattttccaaatgagcatgtaatcgattacgacactatggtaatcgattaaagtgttcttgaaaatttttcagaaagcttatgaacaaaataatcgattctttcgatgctataatcgattaaaacagacttagcctatttttccaaaatacttagcttcttttaaagttttaaatcaattacttagattctatatgatgcaatgcttaaaatatatatatgaatgatatgtatgcaaagtttggatcatcatagtgctttcaatccttttacattaaatcacaatcttccatcttcaaatcttgaaccatgttgaaagccaaaacatccaagacttcacatgcttgattcttcacttgtttttcatgtagctctccctcaaatcaacacctgcccaaacactgtcagtataaccaatcagtcttgatttaggagtagactagtaccatatgccatagttctttgttccttgcaagtatcgtaatactcgttttgttgctccatgtgaacttggcttggactctgcatgaatcttgataatagactagtagcgtacataatatcagggcttgtagctattagataaagcaggcttccaatgaggcttcgaatttgtgtgttatttgcacttggtgtgacatcatcccttgttaatcctttgttgctatctagtggagtagctactttcttgaagtcttccatcttgaatttcttcaaaagattagtagtatacttcttttgtgaaatataggtaccttcttttgtttgagctatctctattccaagaaaatagtgcattagaccaaggtctgtaacatcccgagcattgaagagggcggggagtgatcgccggtgcagtgaggcatggacaaggagcggctcctggcaggcttccagcgggaggggtacatgaatgaatcgaatacacacccgaacgagaggaatccagaggttgttcaagtatgagactgtacagttgaggataacttaaaggatttaataggtactacctataccaacacggtgcatctacttttcagtagcctataacataagaactccctctggccactgactcctcctctacatatgactgggagggtccacctctgagatggctgtacccctcagcatgctgactagctcctcctatctggcgactatcctcgccctcaggaataggatgtggaggatcatatcttcgccgagctctcaactcagccatcaactcctcattggccttcatcaaggcctcattagcctgcctgcttgcagctatctcctgctgcatagcggtcaaggcatctatcactgggtcagggcgctcatccgcacctgcctcaccacctaggttccgggtcctcaccatggtactgcacatatcacataaaaagggtgagttgatcaagctcactctcaacagttacacatgcaattaccataatgaacaccctagcacacacatacaacacacaattcaccatatgtacagtgcttccctgtcaaactgctctgataccataatgtaacgccccaattcactaatcagggtcattaccaaacatacaccacaattaaacagataatcaatcagagtttaagcagtttggaagcatatactaaaagtgacatcatcaaatgtcatatgtataacactgtacactataatatggtgaatatacatacaagttcctctgtacagtacaaaactatacaatatcccctcagggtacaacaaaatccacatctaaaacaaaatacaaaacatctgagccacatgctcatgtcctctagcctaaggtgtccatcagcagctaatcctgcataggcttcttgccttgggatctctctgctattctggaagaatcacctgcaaaacatagccccacacaaggggtgagatataaatctcagtaaactcagggcccttgaaggtatttccttcccctggttcactgacaacatatatatatatatatatatatatcaaacacaatcacaatcatcatcagtgaatcactcaatcaatcatcatgcacaatacacctgaccacaatcaggctatacacatccatcagccaaaaccaaggcatactcatggcatacagccattcatcacatcaataactgtcatgcagaggctacatcatagtatataggaacatctcctcacaggaaggctacctctatatactaggcacatctcctgcatgtatccctagcggaggcttcatctagatatataggtacatctctatctcgaggcttcgtctatatatcaggtacatctcctttttggtgaggctacctctgtatacataggaacatctcttatcacgaggctacctctatgtatcacaaggccatctcatcctctacacaatacagttgcctggggaggctacctctgtgtatatgggaacatctccacataggaggctacctccatatcacaggctcatctctcaccaggtctttctcaatctcaaatcatctatcctacgacaataggatactattcaagcacagcatgcataatcaggtttcacattcaaccaggcatgccacaatcagtcacatcataaccatgcatattaatcccctatcatagggttctgttcacatttcaagcataacagattaatacatctcaatttccctctcatagggatcagaacatcagtacacagtatccatatacatgcatacccaagtttcataatcaatcaggcatgctaccaatccacacattcatacatatcaatttccctttctcagggatcaaatacgcatcaattccctttctcagggatcaactacacatcaattccctttctcaggaatcaaatcatcaatcacaactcatagttatacatcatactcacccatctctgggttcagatcaaatataaagcatcagctaccctttcatagggttcagacaacatctaccaatcattcacagcattatacccgttcctctattagtctaaacacatatcataaccataatcccagtggatatatggtggaatgcaacagaggatacacaaacaagaaccaagagcttacctgctctagacagatcaccggctctcccggcctcgtggtcaacaccaccagagctctcacgctcacgtcctacacaagaacaagtatataacatatcagatacggttctagaccgttcaagcgaaagggaactctcattctttctataaacataaactaatcactgtacaagtgatcatctgatcctcgacaggatccttctcagcctatatcaggctatagagcctccaccaagactctaatcaagctatggtcaagcatattcctgcttaaaaccaacttctcataatcagcagtttcaactcacaaaccgcatctacaacatctcatgagcaactttgtcaactgctctaaggtccagactagtcaaatagtcaaccttttatctctgctcatactgactcagagccaaaatcaaacgtcatcaataatgatgattcaaggctctaacttcatcagagtaactttctgaacataagactctacagagtccgagcctaataacggctctaacacctccaaaaacaccccttaagatattcaaaatctaaccaaagacccaaatatagaaccaacggctagagctcgagtttcttacctctgtgtagctcagacacactagggaaccactttccctaagacagctcgctcagccaagcctcctctggtcctggttcttcgattccaaaaactccctttggaatctcaatctcgccgtaagtcgacttttctcgagaatcaagctaagtcactagcttatctcgacgctctggacacttcctcagttgggtctaaggtgtttagatgagaggtgaagaagatatcaagctctcaaagtcgttaatggcggtttctctctttcttcccttctttctcttttcctttctctttctctctctcagccaaatgaaccatttataaaagcctgcccaaggtcccgcgcggttcgcgccaagtcccgcgcggatcacgccaaaggctcgaagaacccacgctattggcgccggagccacgctattagcgtgagatggctgcaaagattggcctatttttagcttcccgcgctaaccgcgccaactcccgcgctgaccgcgccatgagctcggccaacccacgctgttagcgtgagacccacgctgagagcatgaaaaggccgcatgaattggcctggtttaagcatctggcatggatcgcgccacactccacacggttagcgccacatgttcaaatctgttttctcaattcttttctcaagcttttctctaaacatactaagcctaatcattattcttaatcaagggcttaatccaggcttaattacatgcttaaaattcaagacattacattgagcgttacaagtggtatcagagcaaggcctctctaccagtatggtgtggttcgaggacgaactaggcgaaagctggtgggcatgtaacatcctgggcgctgacgagggcggggagtgatcgccgattcggtgaggcatggacaaggagcggctcctggcaggcttccagcgggaggggtacatgaatgaatcgaatacacacccgaacgagagggatccagaggctgtgcaggtatgggactgtacagttgaggataacttaaaggatttaataggtactacctataccaacaaggtgcatctacttttcggtagcccataacataagaactccacagttaagcatgcttgacttagagcgatcttgggatgggtgacctcttgggaagtttctcaagaagtgtgtgagtgaggacaaagcacactaaaaagtcttgtgtttgtatgtatttctcaagaagtgtgtgagtgaggacaaagcacactgaaaagtcttgtgttggtatgtagggacaatcgttgatcttgtaagtggtcgagcgttacaaggtctgtcatctcaaatgtcttatcatatcttcttttaattcatggaccatcttctcattgtttcctgtatagataagatcatcaacatataaggagacaataagtgtgtcagttgtaccttggttcttgatatataatgttggctcacttttactcctcctaaatccttgctcaatgaagtaactgtctattctactatagcacgctcgcggagcttgctttaggccatagagtgctttctttaacttaagaactttgtcttgttaaccatttaccacgcacccttgaggttgctccacataaatttcttcttcaaggtatcttataataaccaagcctaaaaaaaagaatttacaatattctgtcacaaaaagccttagcgacagaattagcgacggaattagcgacggctagttcctggcgcaaatagcgccagatgctgcgccattagcgccaggatggcgccagtagcactaaagttcaccagaaggccaattttctctggaatctggcgtggttagcgccagaaatgcaccgaaaagccatttcccattggaatttggcgccaatagcttgaaattagcgcgattagcgcgggaaagcgggcaggacctctataaaaggccattttcgcgaattctggcccaaaaacttcaccttcttcctcccagcgattccaccattgataaaccttgagagcttcataatccttcagtccttaaccaaaacctttagcttccaatatgaaacttgaaggaaatcatcctatgagctagattccatcatcagttttccctaaaaaccatcaaatagagagatcattttttttagggaactttccaaagtttcgatttcgaagggaaattaggcgttttaatgacacccaagcttggagaagttggcctctaacattccttgtcgatttagaggcaagaaacataaattctatcgtttattaaagaatttattcttgaggtgaatagtgacctttttgagttagagttgaaattaggcttgggtcctttggaaaagtatgcttaggaggttgttgtgatgaaggtttaaccttaaaatatgatttttatggactttggaatttggctctgaataatgtatgagtaggaagaatgttggttaaattggtaattttatgctatgcatgagccttggtgcttttacaatatgtgctcaagagtctatataaacggtgaaattgttgaagtaactgttttagccaatttgataatcattgaaatgtggtatggttagggtgttgaaccctttgaattggttgatgtagagtcttagggagactctagtaccttaattaggatgagatatatcctactgggggtctgtaaatcaccagttaggtgattagtctttgaaatttagaaaaataggttaaatggaaaagaatagctttcctttctttccaactgttgagaaccgatgttgattccttgtgtgcctttgtatagggcgtgacaccgagggtgtcagtggcggaaaccacagttcaggaattgaacagtagagcacggttttgctaggtaagttctttgttcttgggagtgtttccaactacttgagttccaccatactccgagggagtgatggttgcatacatgattcatatgcattgaattggatcttacaactttcctcatgataatatgtatgcatgtttatgtgctttgtgtttggttgcctttcggatacatattctggccagttagataaatatggacctccctaggagtagagtgcaactcctagtcagtttgctcacgtaaagggtgtatgatcccttaacaccagagataggtggtcccgtcgcaattgaagcctattctcaaaggtgccatatacgtgcatccatgcgtaaaggggtagctcccgatgggatggcacagatgtgagttccgatctcacattggggactgagagtcccgatgctgatgatgatgcatctttggcaggcgtagtaccgcagatacacattagagctagagaatgtctctgtgttgttgtgagggccaggaggcctggtgttgtgatgcctttgatgttatgtatcatggaagtgagccagggggaggagaagcctccaaggtccctaagcttactgagattgtatctcaccccgtgtgtggggattatattttgtaggtgatacgtctgggcagagatgatgggtcccagggcgagagactccagtagggacagaatctatgtagttgcttggtagtattttgagaacattgtggctcactattttatgtttatgatgtattttgtacttctgcgagggaagatatgagtgtacacatattttggatcctgtatggatgtgatgtacagacgctatacgtgttgtaccctcttgtaaggatgtgatctgtgagatcatggcacagggtgcctattcttttgtatagccacaatggtggtttttggtggtgtatatatgtatacacccatatagacatatgtggcttttgattctcctgttgtatttgtatggatatattatgtctttacctgtcgttctttatgttatctggatcgtagaggcttgttgtagtattgtggctttcgtttatgtatcgtggatacgtaccatacataatgaatcaagaaatatggttttgaaaggaaatgatgatgatgtcatgttttttattgaaaatgcttccgttgtttttacttattggttttcaattaattaatgcgttaatttgattaaataattgttaatacaccagatgcatacgggggtgttacatatctattgagaaatgcaaactttacatctagttggtaaatcttccacttcttttgtgcagccagtgcaatcaaagctctaattgtatcaagccatgcgaatggggcaaatgtctcattgtagtcgatgccgaactgttgagcatatcccttggcaactagtcttgctttatgtttttgaattgagccatctaggttaagttttgtcttgtaaacccacttaactccaatgacttctttctcttcgaggaagatccactagctcccaagtctagatcttgtcgatcatctttatttcttcttccatagcttttctccatacttattgctttgaagcttcttcatagttttctggctcggtgattgtgaaattgcgtacctggtagatctctgacaatgacttagttcttggtgtcgactctggagatgaggcaagtgattcttcccctgttgcttgtgttggagatcttggttgctcattatcttctttatcttttggtggttctagtaagttgatattctttctttcaacttgttgagcctcctagttgtagaaagcatcttcatcaaactttacgtctcgactgatgattaacttctttgttcttaagctatagactcgatagccttttgattgggtgctatagcctaagaagattcctttttccgctttctcatccaacttgcctcttttttctttcggaatgtgggtgtagcaaatgaaaccaaaaactctaagatgttttgctgatggcttttgtccactccaagcttcgactggtgtcttgtcttgaacgactctgcttggacatctattaagaagatagactgctctacttactgcctctgtccaaaaagattttggaagacctttctccattagcatagatcttgttgcctccattactgttctattcgttctttctagcaaaccattttgttctggtgcatatccaactttaagttgatgctccatgccttcatattcgcagaacttgttgaattcaatagaggtgtattccttacctctgttgtaacaccccgtatgcatccggtgtattaacaattacttaatcagatttgaacaataactaatttaattaaaaaccacggaagcgatttcaaaaccatatttattgattcattatgtatggtacgtaacctcaaataaatgtgcgaataacaatacactatagccagcctcatcgatccaaaataacataaagaacggcatatgcatcaataatatctatacacatatatcaggagaataaaccacatgtatttacatatacatcatcaagacactcattatgtctataccaaagaataagcaccaagtgccacaatcttacagatcccatcctcaagtgagggtacaaaatacatcaaaaccaaaagaagtgagccacaatgctctcatcacattgccaagcaactgcacagagtctgtccctaccggggcctcccgccctgggacccatcatctctgccagatgtatcacttgcaaaataatccccacacacggggtgagatacaatctcggtaagctcaaggctcttggaggcttctcctcccccttggctcacttccatgatacacaacatcaaaggcatcacaatcattcggccatctgaccatcacaacaatacatagccatcctctagctctaatgtatatccgcggtactacgctcgccacaagatgcatcatcatcagcatctgggactctcagtccccagtgtgagaccggaactcacacccgtgccatcccatcgggagctacccctttacacatggatgcacatatatggcacctccgagaataggcttcaaccgcagtaggaccacctatctcttggtcttatgggatcatcagcaccctttacgtgagcaaaccaaactaggagttgcgctctacttctagggaggtccatatctatctaattggccagaagatctattcaatagataaccatacacacaaagcatagaatcatgcatacatattatcatgaggaaactgtaacaaccaattcaatgcacatgcatcatgtatgcaaccatcactccctcggaatatggtggaacacaggcaatgggaaacactccctaagagcaaagagcttacctggcaaagtagcgctctgcagttcaatcccagaatggtggtctacaccactgacaccctcggtgtcacgccctatacaaaggcacacaggcaaaatcaataatcaacctaaccttacaaggcattaagtacataacaacgattctcaaccgttaaaatgaaaagaaacatcattcatttccatttaaacctcttagtcctctatcttaaggttattagaactaaccaccttatagtcaactcacagaccctcagcagggtctatcttggcctaaccaaggcactagagtctcccaaagactctgcatcaaccaattcaaaggttcaacattactaaagcctgaaactcaaggattaacaacatggctaaaacggttactaccacataattcaccgtttatatagtctcctgagcacatattgtacaagcatcaaggctcatgcatgtcctatagtcaccaatttaaccaacattcttcctacacatacatttctcagagccaaaattcaaagtccatgaaatcaatatttcaaagctaatccttcatcataacaacctcctgagcatacttttctaaaggacccaagcctaattccagctctaactcaaatgggtcactattcatcccaagaacaatttcacaaatcaaacgagaaaacttgagtttcttacctctaaacagtcaaggaatgctagaggatcacttctccaagcatgggtgtctgtaaatcgtctcctttccccaccaaactcaagttttgtgaagtttcctagagaatgcgatctctccgtttgaagatttttagggaaaagtgatgaaggattctagctcataggatgatttcctacaagtttcatgttgggtggaaggtgtttagatgaagattggtgaagaaatggagcttccctagtgctctaatggcggaaaaggtcctgatgaagaaaaaggaagggttttggcccccaaaatcacgtaaaatgaccttatatagtggtccagtgaaaataggctttctggagtacttctggcgctaatcgcgccactctggcgctactgcgccaccctctcgtatgtttggcgctactagcgtcggcctcccttatgtctagtgctactcgcgccagacccctttttttccaagggttattatatctgtcactacttatcttcattatgctgtagccactttgcctttagacccgagttttgaatttcttgaaaatattgaagacttacgatttttctcgtaaaacataaacccaagtcattctagtgtagtcatcaatgaagagaatgaagtacctattttggttatttgatggagtacacattgggccacaaacatctgtatggactagctacaacggttctttggctcgccctgaatttcttgatggaaaaggttgttggtgttgtttcccgagcatgcacccctcacaaatgtcggtgtgctccattattggtggtagatctctcatcatatttttctgttgaagaattttcaatccttgtacattgaaatgcctgaatcttctgtgcaatagccacgactcatccacttgcaccttcattgctgcatcacttgcatatctccattgtattggaaaacaacgattctctttcattttgatttttgcaattaagagagatttatcttgcttatcataaattttgcaagaatctccctcaaaatgcaaggattagcctttttccatcatttggccgatgctcaataaattttgatataggttagggaccaagagtacatcgttgatgtatcttttcccctttttggtttcaatggcaatagtgcctcttcccgttgcctccataaaatctccattgccaatttttatttttgtcttgattttatcaagactacataaaatattttcatccttcgtcttgtgattactatagccactatccaaataccatgtatcctttatttcttttgatgtatcttgggagacatagaagagaacattctctgactcttgttcttcagagaaattaattttatgatttagttttaagcgacaaacctttcctacatgtccgaacttcttacaatttcggcactatggttttcctttaaaccaacagtctttctccaagtgactatttcttttacgaatgccacgtggaggaaactttccacctctttctttatgtttttcttgattctcattgtttctagaattttcatttgactttctcccactatctttaaattttctatactgctttcaaatcgcctttctaatcttttttcatgagcctctaaagaacccattaattctggagttgttaatttatctatatattttgactcttcgatagctgcaataatgggatagtatttttctgtgcatgtaattaaaatttttccaacaactttattttgtggaatattatctccatagactcttaattgatttactacttcttcaattctagaataataatccctagcaatcttagaatcattcatttttaaattctcaaacttccttcttaaagtttggagattacaagtgtgtaccttttgatatccttgaaactcctcctgcaacttatcccatgctgcttaggttgagttgaagagcgagcaatgctagagaatctttttgttcagtctccttgaattcctttctcagtgctgcagatagagtggagatatcttcaggactagtatatcccttagtaacgatattccacaaatcttgagcacgaaaataagtcttcattttgatgacctaaaaatcatagttttcaccatgaaaggttgggattggaatggatgagcggaagttatctgccatagtagcagattaatagaagaatgccttatattaatcgaacaaagctctgatgccactgatggtagttgttagaaaattggttgaatgtgttttgctttgaaggataggatggatagaatgtatgataagtgagatagtaattaatgagaatattgggtaagtttagaaaggtgggaacttagtttacaagagaactagtgtttttatttttgcttgcttgcttgctcacttttcttgcttacataaactacaaggctttgtgggtatttataggagtctccacctccttaatatgtggtctacatttgtttatctagaaagctctattctaagttattctacaactcctaagtctttctagaataatctacataagtacatttttttttcaatgtctctagattattctcttaatatcttcaagcttccataagtttccagaagcttctataagcgtccataagtttctagaaggttccataagcttccataagtttctagagcattctagaaatgtgcagcattttctaatacaagtagatgtagagggagcttagtttcctagagtttaattagtattgtttttatgatttttttaagctcctgaaaccaaaaacaaattaagcaagttaagttcacccaaaaaaagtatgcaatttaggtcatagataaaaattaatgattattattctaccttatggttctttatatatggagagcgccaaagcattaatcgatacactttatggaaagattatgagcttcaagtttagctagtatattaggtacattgtgctttttcttctcacacacctctttgatgagaacatcttttcctgatatgcttgctccaactttgggatatatcttggtaggtttatcatcaaaggtacatgaaacatcataagaaaatattggttttttttttttttggagcaaaccaaactaaaatttttaatgcaaactaggaaaaatttgtcatggaacgaagtatgactgaaatcaaacaaaatttgttaatgcaaaaagtaaatatagtaacttacaaaatcatttctaaaaaatttctcatattttccttagattaattccaatgttttcttggcaaaatatcgtaattatcatcttactcttctataataaactgttgcgactacatgttccatgacaatcgtttaccaagccacccgatttttgccaagaataaagaattctttgatatattgattatctcctcaactttttgttagttgataaattatatggtattatttcttcttgttagacgaggcaaatgacgattcaaatattttacctagaaaatgtggaaaacctaaggaaaaaatgagaaggttgatagaaatgattatgtgggcaaaaaataataaataatataaattaattatttaattagcaaaaaggggtgaatgaggcaatatttaggcatctagggcaccctaacacgccctgcctaggcgtgtttaaacacgccctggctaggcgtgttagggtcccttgatgcctatatattgcccattaaaattagtttgtacaattgcgccttctctctataattagtctgtcttctcactagaaagtgatttttctgaagcgaagccctgccgaattcgaagtgcggttgacaagtaattagggttctgtgtagaagttgttgtgcgttaggatctacagcttgggataggatattttgtgaacattagcgttggaaagaagtaagttctaaaccctaaacaatgttgcatattatttaaagttgttagcgacatagctgttaggttcatagtgtctatgtttacgtcttagggtttaggtttagtgttgaaattgtcattagggtttatagggtgattaatgtttaagtgtttcgggttagggtttagggtttctggggtgaatagggattatgtcttgatggacacacgtagggtttatggcgcatgtgtggattaaggggttaggtacgggggtacacacctagggttacacacctagggtttaagtgttacggtgtaagggtttaagggcatgtgtggattagggttaagggccggtgtacacacctagggtttagggtaggcggcttaagtgtttagggtttatggtgtgatttggggttaggtcagggggtcagggggaacacacctagggttgagggtatctgtggtagggtttaaggcgtatgtggtggttagggtgtatggcttggcgtgactggacttagggtgtatggcttggcttgaccggacctagggtgtatggcttggcgtgactggacctagggtttacattgttgtgtaaacaagactacttctttatgctttgtgtctttgacaatattgactttctttcaccatttggtgatttacttgtgagtaactacatctgtagaagtgtttatgtgggttagggtttgtttagtatgtagggtttgtgtttcataatttagggtttcgggtgtttgtgtgcttctgatgtttatttatgttgattgcaggatgagttcaagtgatgcggaggttgttcgtgttgtgtttttttttcaatggaaggaaaattgaagggggaaaaggtgttgtctttgaaggggaaaaaaggatgacacaaatcaaccgaaatgcaacattgactgatttgcatcagaagatacgtccaaaattgggtgtggatggaaacacttgtatcacattactgacggcaagaatatggcagcaagatgaatacatggggtttccaatacaggatgatgaagaattggaaatggtcattgaagaattttttaatcagtcacggaagaaatttttagagttgtatgtggattacaccgtagttgacgaagctgttttacccaggaggtcagttggttgtaattctgcgcatattgcaccatcatatgatgttgtaggtgcaaacatgtctcaggaagattcacatgacccaacttgggttatggatgacgatgaagaagatgatgatgatgaaaatatagcgatggaagatcgtcttcttcaggagaatgccagtgcgtccgataatgatgaagatgctggtgtggatgcgaatgcattccagcaacacactgatgtggggtcgtctgaaatgcggtaccgtgcgggtgttggaccgacacaatcagaacaaccagttaaggtaatttatatgacttaaaccctatgtgatttcgtataattgttgttcatgtatatattttgcaaacccatgcttattaatgtgtgttgtatttaaaggcgatgcgattcttcctttttgggatgggattccacattacacatatatcgattggaatcacccaagcgaagaagattcttattcttttggtggttcagcttcaggatcgggttcagtccaaggtccctggcaaataggggatgatttgtttgttgaacaggaattcccttcgaaaaaggaggcacaaattgcagttaagcgaaacctaatgagggaacatcaagaagcagttgtggttgagagcaagcctgacaagtttgccatgaagtgtgttgctcacaaggatggttgcccttggagggttagggtgtataaaccaatatacggtgagaagtgggtggtttcaagatggggtggaaaacacaattgcctcaacgactgtatatcacaggatcatagacaacttgatgttcatatcattgcttcacttgtagcaggtatgaactcagaatttgcgcttttttgaaaaatattaaattgtgttaacgttaatggtaaatgtgtatgttacaatgtcattttcaggaatgttaaggaggaaccaggtgtgtcaattgcattggttcaggagaggatcaccaacagcttcagatttaaagtttcctattgtaaggcatggtatgcgaagcagagagcgatggcaatgatttatggagattgggaagaatcttatgtgtttttgccgaggtggtgcaactacatgcttcggttttcaccaggttctttttttgatattcaaaccaatgattattttgaggcacatcgactggtcagagggaagcgtgtgtttcagtgaatgttttggacttttagacagtgttgcgaggcttttaagtattgcaaacccgtcattcaaattgatgggactcacttatatggcaagtataaaggaaaattgttgatcgccacgagtcaggatgggaataatgaatgcctgccattggcatttgccattgttgagggggagacgttggaagcttgggaatatttccttgctaacattcgtttccacgtaacccaaatgcaaaatatatgcctcatttcagatcggcatcgtagcattatatctgcaatgcagaaccatgccggttggcaaccaccttttgcgcatcacgtattctgtcttcgtcatattgccagtaatttcaatcaaagattcaagagtgcaagattgaagaagagcctcatgactttgggtatgttcagaattatgtgtaatatagttagattacaaatgtcttaccagctaacgttaatggtattataattgtgcaggttatactccatgtgtggctgaatttgacatagcgtatgaacgattccgctataccagtcctgaggttgcagaatggattgatagcattcctaaggaaaagtggactcgtgcatatgatgtcgaggggagaagatatggccatatgacaacaaatttgtctgaatcagtcaacaaggtgttcaagggagcaaggaacatgcctattactgctttggtgaagcacacatacagtcgattggttgaatactttgtgagaaggggtcagacggcgaccgcacagctgcagcaatcacaacgacattgtaaaaatgtcgttgatgcattgaggcataatcagaacattgctacaggccacaatgtacgcacctataaccttcaggaaacgtcgtttgaggtggccgatggctgggacaggttatattcagtaaacctaactgaccgtttttgtcagtgtgggaggtttaaggccttcaaatacccttgtagccatgccgcagctgctgctttatacatccgtcagaatcctttgcaatatgtggatgatgtctttctcgtaaccaacttggttgaggcttattcattaccttggcagcctattggtgatgaacttgccattccccccagtgaagatccagttatcattcctgacagggcaatgttgcgggcgaaaggtcgtccaaggtccaccagaatctgtaatgagatggacgaagtcgaaacaactcagagagctcgtagatgcgatctgtgcaagcaagttggacatactcgtacagcttgtcctactcggggtggtgtttcttgattctgttattatgtttgcttgataagtgcgtggtgaaatgtatttgattttaaaaaataagcgtaacatgtatgacgataatgttttcgttgtggtgcacatcaatgacgataaaaaatgtcgcgtaaaaatgttgttaatgctctggtgacacatgatttattttgttacaatattattagttaattatgtacattatgagctatattttcgttagttagttacgtactatatgacctaggtttaggtgacatagttggtgacctaggttttatgaccgtaaagatgttgttaagttgttcaatccttaagccctaaagatgttgttaactggtgcaatccataaaccctaaacggctatacaagcagagcgtgtctttacaaatgagcattttttgtgtcactagacaatacacatgcatttattaacatacctaactgaagacccctaccaagggcatgattgaacatgcccaacgaggaagtctttgaacacgcgtaaatacagcgtaactaaatacgcctatgaaatagttaggtgtgactagacacgcccaacttggccgcgattacccctatataagcaacaccgtcggacacaacaagcatcagacgacacgggtgtttcattttgcataccatggcattcttaggagaaacaagcagccaaagcattggtaactccaaattagcatttgtttatcccaatggatctatgaagcacaacgacacgggtgtttgttttcagggtgccagtccaatagcgatgcgagttcctaatgagtgttcatttcagacacttcagagtaggattcaccacacccttctactaaccgatgaccatttcgtggataacatctactatcgacaaccatctctagacgcaggtcagcactatgtttttcattctatcgcactaacaaacgatgatgatgtttgcagaatgttaaggtgtcacgaccaaatgtcgactgctggtcctatagaaatgttatgcaccataaacagaacagccgatgggataatcaacctacttcagtcgaccatcgtccccacgcacgttgcaatgttatattacaacggaagttggaacataccacgaagacgcgattctgtgggttatgcctttactggaaccaacccaatccgatttgaaattccttctgcatgcactattgaaacactgaaggtcgtcatcaagcaagttgcgcctgttggggttccccctaatggaattcacatgtcacaggtggtaagaaaaatgtttttccggcgtccagcacatgcacaatactcagacaccacaatccagtatgacataaaggagttggtaagcgatgaagacgtgttaaggatgctagcgggatccaactactggaaacgtcttggtccaattgaaattttagccatatttagccaaccacaaatcgatatggaataagacatgtacgctgaatatgttgttttcaaattatccttataattaaaaatgcattttcgccccatttttaaaaattgtaatcgtgtctgttatgaatttatggttttcacggcgtatattattgttagggtttgcggggttaacgtgatcaactaatcattagaccgagcggcgtaaacataaatgtcacaaataaccatagtttacaaaatacaatcgattacaatacacaaacaaatataaaacagtaattgcgaataaatcagagtgagggcggtggccacggcaaatgacgtgcctgccgatcaggttgtactcgtcttcgtggtcgccgagaactacctggctcggacggggctggctgtgaaggtcgtggctgagaagggcctgcctgatacgggtctggatgggattggcctgcataagaagggcctgcctgataagggtccagctgagacgggtctgcataagaagggcatgcctgataagggtccggctgggacgggtctgcatacgaagggcctgcctcatacgaatgcacatgaggagatcgacatggtgtgccctgctctgcatacaccggcataggaaactcagaagcttcggtgccatatggtgaatgtggctgccaagcggcacaggcttctacactataatccatctggtcgagcatgtcgtcgaactgtgcctcagtccactcgggctgcatgttcattccacaaccgacgaaccgccatctacatctgcacatgtcattgctgtcgtaacatatgcggcatgggtctgcgatgggcctggggtaggcatttgggcttgggtactgaaatcggcgtagtccatgcccccatgccccccatgcgcagtagcctcgtaatatacgggctgtgtcccatatgtcaatgcaataatagggggcctatagatcccctcagtgcgcggcctcggtcgaacaatgggctcaggaacctgctgcactggtctccgccaacgctctagcccacgaccctattttcttcgccggccaactgcaactgaaatctatggttcggcctcaagctgggattcgggagcatgtgggcctgcttcctccacgtgacagctctcggcgaagacagacattaagcgactgacctcgtcattcgcccaaataaagtcgaaggcctctctatcggggctagttgtcgcgaagtacaacgcctccagcccatcaagctacgattttaaagatatacaaaaaaatgtcaggtgtgtgatgtacgataatcatatcttctccccagctatatcgaccgatgtccgaaaaatcccctgcaagcaacgacatgtatcatgctgcgaccatgctacctccagatcggttgcacagcagccatgctctgataagtcgtgcaatgtgggccttcgtgaaccgcgtcacgtgaacaagttcgggaacaacctcaccccaatgtgcaaaatgtctatccaagaaagacaggcgcaaatatccacctatcagctcggtgtcctcaggttcgtgaccaaacacctcatcaataacgatggatgagagtggtgagttcggccacaatggtggggttccaatagaaccatggagcttttctattctagtgtattgttgcacaaagatcgaaggaaagaatttagtagtgagacctgttaacaacctaaataaaaattaaaaaaaaataagctgaggtaaggtgaggggattgcaggtactacttacggggaggtgacgggagagaagtgagggtactcgatcctctagaggtcacaaccgctgcatcagtacagttatgagatccacatgatttattaattcattggcaacgattacccagtctcccttcgttacatgctttgggaagggaatcagtatgcagatgcactgaccatgtttggtgctgggattataggtttcactggtggtggttcttaggcaacctaagtttcttttcctatcccttcgagcggatgtagagggagttcggtttcctagagtttaattagtcttgtttttttttatcgttttttagctcctgaaaccaaaaacaaaataagcaagttaagttcaccagcaaaagaacctaaatggtgtttttttcaaaatatttaccgataaggggctgtttcacaaatatttacaaaaatggggctgtgtaacatgcctggattagccatgttacaacacgcctagattgggcttgttataacatgcctggattaggcatgttataacaatcccaattctataaataaggtcccccccaccatttcctcactttccactatctctctagaagtgctctgccttctctctagagtttttggtggatattctgtgcagcgaagctctgctgaatttcgaagttgttcagaaaaaatcttgcgaacaagtaagcgctctgctctgccttttagttatgttgttcttaattagttatttatattgttaatgatgcatgtacttatttttagcacaatagatgttaggttacttgataattgttttagtttaggctttaagatatatttattagaaaaatgttaggatgatgttaatttgttagtgacataaatttaggtgggtagaaaattctttaggtgtttggtactgtgcttttggctaaaatgattagaatttaaaatttagggttttctgggcatggttaggtagtgtttatggtttgatgatgtgatattcgtttgtggttaatggtttggttggtgggcatggttacttgacgtttggattagggttggggtattgttgggtttcatggtcatgtgacgagggtgtgcggtttatggtttggttggccttgtatggtatagggtttagggtttagggtttagtgtttggttggccacgtatgtgacgtttagtccagggttgagtttagggttggtgtcatggttctggttgcatggattagggtttggttcagggttcggggtgcggtcattagggtttatggttgtaggctgaacgtggtctagtgtttagaaatttgttgttttaatgatttgtgaatttggaataattgttaacatgggtttttatttgtggtgtatgaagttactgataatatggccgatttatctggatctgattcgccgcactctgtatctgatcatgaggctgagccgatggatccgacatcttatgtggttcctaccccgtacagatggggcgctctgcgtaggcgtacgcagcgcgcccatgtttcacaatctgtgtggaacgagggcacagtacgactactaaagactcgacgtggcaaggcgtcggggggaccagcatatgatgacattcctcaagttgtttctgatatgctgcgggacgctggctttcttcatgtagcacgtatgcgacatattcaggtatgggacatgtcatagtagtaatcaaattttatttaaccataactatagttgtcaattgattcatgatattgttttagattgatgctgccctgattagtgctctggttgagcgatgaaggccagagacccatatgttccacatgccacagggcgagatgactatcacactacaagatgtggctggtattttgggattgcccacgtctggcaatgtcgtcatcggagtgactttgtccgattgggcagaggtgattgaggacgttttcggtcaagaacttgatgacgaaacagagctgaccggtggatacctacggctgacttacttcgataggcattttggggattgggatgagttggacaaagattttgtcaatgtcacgcggtttgcaaaggcgcacattgcccaccttattggttcatggctgctgagcgatcgatctggaggtagcttgatggcagcacgctatatccctttgttggctggggatttcccagagattggaggatacagctgggcatctgccgtccttgcacatttgtttagacagatgtgcgagtgtatagatgcatccagaaaggacattggtggatgccatatgttgcttcagccatgggcgtggctgagattcccaccaattgctccatgtattccgcagcctagtgacccaccagcgcattttggccaccggtatgtgtgactacatgttcattttataacaactgaaacaattaagccgtacattgtttaatgttagttgttttgttaacaggtttaaccgactaccccggcttacctcgcacgagctggtgtactacaggacggccttcgaatccctggatcgggacgacatatgtatagtgatagtttagtaattgcatgttagcattagttgtttatgtcataacataaaagaacctaaatttttttttatgcaggtggtctgggaaccatatggagattaccctttcgttggtgcatctgaccatgattgattgttgtggatggcatcgacgcctattatatgtttccacacagttgaagctgtccagcccgatagatgcatgcgtcaatttgggagggatcagccaatcccacgtcctgccatgaagctgaagggtgtgcacaacttttcacttcgtggaaaacgagaagaaaactgggtgcgtaagctcaggccatttctgaatcgctggcagcaaagggagcagcacatcgaccttcccccccaatccagggccaaatgtcaccaaaccatgagtacatggtatggtacagagaaaatgggaagcggtttaacacaaaggagggtgcgaagatgggtcgtagtgtaagtttcgttttcattaataattattttagttacattaattatcataattgacatagttgacagtgatgtttatatatttgaatttcaatttataggtcgatgggatagagatgctatacttcgccacgcataggcagaatagggcgacgttcgactttgattgggcgcatcaggagttgggtcgcttaatgtctgtattcagacaaagttgtcatgtggtggagtctgaaccagaagccccagagacgcagcttgaggaggagccgcaattgtctcttcaagttggtcggcacagaagggagggacgtggtctggagcgtcgacggagacctattcaacaggtgcctgagcccattgttggtcccgggcctgccactgctggtacttttaggccttcagatgtgtcgtcgacatatgggagtcaggtgttctatcatgatggtactgagcatagtgcctcctactattctgcggatgtgcctacaccggcggacgcatacggtgcagatgtcgactttggggatgtgcccgctggttggatgcatacgaatgtggaacagatgctcatggattttgatatgaccactacaggctgtgggagttgggcatccgatgccatatgttccccaatctgctgagcatgctatgccagtatatgcaaagcatggcactccatgtccaactccgtatgtcccatcgtatgacacaggattttctgaggctgacatgtatcagccagatccttatcaggtaggcccatctcagctagaccccgtagaggcaagcaattcacaacgacctcgaagacggaggcaacctgataggcaagcgcgtcggcaacagtggccaccaccatcttagttttagttgattgcttgtagcattcgtttgtaacacttattttaatgttgtgtattgtaactattatgtatgttacatttgtttgtgttatttatttttcagtgtacgtattagttagcttataattgtcgtggaatgcacgaattcaacacaaaccatctaacacctcacacctcagcccgatttagtattattcaggttgattgtatctgtcatcatcacaggcgtttggcaaggaagcaaagtgaacagagacaaccaaagaaaattgcagctaaggaagtgcttgccaaggcaaaacttgaatgggaaaactaattactcaatattagtgaagtttatgcaaagccttacccctaagtctgtaaccgaagacgttaaccctaagcacagtatcatgccttaacactaaacaggaatcgataaaccctacacagaacgttcatttgtaataagaacaataatgtaaaacaacatattcagtgcacatttctcattccatctgcatgtccggtttgctaaaaatggctaaaatttcaataggaccaaaacgtttccagtagttcgattctgctatgatcttcaacacgtcttcgtcgcttgtcaactcttttatctgatattcgattgtggtgggcgaatattgtgcatggcgtggctgttggaaaaacaattttctcaccaactgtgacatatgaatcccattagggggaaatccaaccggcgcaacttccttgatgacagccttcagtctttccatggtgcatgcagaaggaatttgaaatcgtattggatttgttccagtaaaggcataacccacagaaccggctcttcggggtggttgccaaccaggatgactttgaacagcagatatgatgttccggtggcgatccgaaatgaggcatatattttgcatgcgagtaacgtggaagcgaatgttagaaaggaagtaattccaagcttccaacgtctccccctcaacaacggcaaatgccaaaggaacacattcattattcccatcctgagttgtggcgaccaacaattttcctttatactttccatataaatgagtgccatcaacttgaatgatgggtttgcaatggttaaatgcctcacaacactgtccaaatgtccaaaaatgcgatgaaacacgcgctttgcccgtaccagtcgatttgcaacgaagtaatcattcgtctgaatatcaaaataagaacctggtgcaaaacgaagcatgtagttacaccacctgggtaagaatgcataagattctacccagtccccataaaccattgtcattgctttctgcttcgtataccaggcctttcgataagaaacttgaaatccgaatgtgttggtaatccgctcctgaaccaatgagattgacactaatgattcctccttaatcattcctaaaaaaaaaattgaacaatcacatcaacaacatgctttgaaaacaaatatgtctttgaaatgcatcatagtaaataaaaacataccaacaaccagtgaggcaattacgtcggcatcaagctgtctgtgaccctgtgaaacatgatcattcaagcaattatgttttccaccccattttgaaacaagccaattctcacggaaaactggtttaataaccctaaccctccaagggcaaccatcagtatgcgcaacacacttcatggaaaacttgtcagacttgctctcaaccacaattgcttcttgatgctccttcatcaagttatgcttcactgctaattgtgcttcccttttcgagtcaaattcttgtttcacaaacaaatcatcccctagttgccacggaccctgcactgatcctgaacccgaaccagaaccagaaccgctaaaagagtcttgttcgggtgggtaactccaatcaatatatgtataatgaggaattccttgccaaaacggaatcgcctcagcagctgcacattgaacgtcagttaaagtaaccatatcagctaaaaacaattagacaaccctaacccgtcaccaaaatacccaaaccctaaaccccaatcaaaccctaaacctcaacagcaacccataaaccccaaccaaaccctaaacctaacacaacgcactaaaccccaaccaaaccatctaaacccttcacactttcggttaaacaggatacacttatttaacctaacaaaataacatcatttcatggacattaaaaagcatattaataaacaatataaaacaaattaaatgacaaaacattctaaatcacatcgttagctaatttaccttgttctggttgactcgaagcaccctccacatgatgacgagtttcagatggcccgacattaacatcttcctgatgtacaccagcatcctcatcctcatccgacgcactagcatcctcctcgagaaggcgatcttccattgcgatattttcatcatcgtcatcctcttcatcctcatccatgacccaagtcggatcatgtgaatcctcctgagacacgtttacctctccgccaacaaatggtgcccctccagcagcatatgatgatgtacgatgtggaactgcctggatgggtaaagcaacatcctcaacttctgtaatatccacgtacaactccaaaaaatctttccttccctggttgcaaaattcttctagtaccaactccacgtcttcatcatccattatttgaaaccccatgaacttcttgtgttgccataatcttccagtcaataaagtgattgactggttgatactcagacgtaatttttgccgtatcttttcatgcaattcactcagggttgacgtacgtcgcacagaggttcctcgtgtttccccttcgaaaatcacaccctgttggccttgatattttcttccattccaatataagacaacgcgaacaggattaccacctgaactcatgtttcttgtcactgacaacaccttcaaaaatctatgaaaaaatgaaaaaacaccagaatgatggagtttagtagaggcagagaacactggaagccaatatatgaaggaactggagggggggcttatttatagaattggggttgctgtaacatgcctggattaggcatgttacaacacgcctagattaggcgtgttgtaacatgcctaatccaagcatgttacacagccccagttttgtaaatacttcatgtcacacagccccatttctgtaaatatttgtgaaacagccccttattggtaaatattttgaaaaaaaacaccatttgggttcttttgcctaagttcacccaaaaaaaagtaaccaatttaagtcagtgataaaaaataatgattattattctaccttatccctgattatatgcatgtttatggagagcgccaaagcattaattagtagtgaagcaaagagatgtttcttagagtttaattagtcttgtttttctgttttttttttttatcagctcttgtaaccaaaaacaaagtaagcaacttcagtcattgataaaaaaaataatgattattattctaccttatccttgattatatgcatgtttatggagagtgccaaagcattatttgcaacactttatggagaggttatgaggttcaagcttggccaatagctttagtacattttgcttttgcttctgacacacctctttaatgagaacatattttccttatttgcttgcttcaactttgggatatatcatggtaggtttatcctcacaaatccatgaaaggtcctaagaaacgatattggtttggtttattttagagcaaaatcaaactaaaattgttaatgcaaattaggaaaaatatgtcaaaagaagtatgacttatatcaaacaaaaattgttaatgcaaaaaggaaataaagtaacttacatagaatctgtttggatgcaatccaaaagatcttctaacatcttatctattagaaaaaagtcttctttattttttaagagtgtttgattattaattttttatagcttttacaaaagtaagaactctcaagagacatgtttaaaagttcaaattctcagcttatgtaatggttactattcggaaattcgttccctaaattatgcttggacaaaaatgttatcaaaaattttcaaaatgacaaagcatgtcctacacattttctaaacccttagcacttgatttctctctcttgctcctcagaagttatgcatcttcctcgctcttctgttcctcaatctcttctgttttgcaatttctcttcagatcatccttcttcatctcttcttctttgtttgttagcatcacaggttaacaatttattcattaattgttttttcttctcgtgaaactttgaattattatggattagggttatgctttttttttttcattgtttcaatttcttaagcttgtgaaatgtctctcaatcaagttcatgtgaaaagaaagaaagcataatggtggataaaaatattgagattatgttgaaaatgtgcatagaagaggtgaatgctggaaataaacctcacaaccacttcactaagcttggttgggcaaatgttttagaaaagttcaataaggaaacaaatttgacatatgaatataaacaatttagaaataggtgagattttttaaaaaatgaatgacaattatgggctaagtttattgggaaggacacttgtcttggctaggatggatagaagaaaatcattgctgctagtgatgaatggtgggaagccaaaattcaggtgtgtactattcaactaaaataaaattagtgctagttgtacaattggtcattacatcccttgatctagctgcaaagtttatagagtagattatgctactgttgttgggggtttgtgttatgaaaaggactttctgttgttgatggtgatagtactttctggtgttgttgttctgaaaatgactttctgaaaatgactgatctgaatctatagttatttctttatgaaattatatttttagcacctttagaaaatggcaggtgtgtcttagaaccttggaccagttttgttgtttatcaattcccattctttgttttcattgaatatattttaaatctgtcacttggttttcatcgaggatgtaggcttagtaggtatctaaattctacatcactaatgtacaaacatgtattggttctggcttatgaaagggaacgcatattgtgggttttgttctcattttttgccaaattaaagtctgattttttcttatgatacgtgattgttttgtactgaagttctgatacatatgtgtactgaggtgttcaatttcatcctatggtgggtgggtagtagttggtaactctgggtgttgatgtgtaatatagagattttaggtttcaggaattgtttatgataggtggttttattgaggttttggttatgaatgtaaaagaaacatgttctgtactctgttaagggaaattgagggtggtggttccatttggtcaatatgatgttcagcttataaatttgttgatggcttgttaatttgcatatttattgttgtggtaacacttgtttgtgagtcttggtttttagtttatggttgttaatttgttaaggaagaatcagaagatcatttacaaaatgagtcacagggtgcaagtaatattcaatttcattttggtttgatgatcacaggtccgaagctgatagttacataacatgttaagggaaaaatggataacaatgctcaacagttctgttaaacgagtatataagaaacattgtgaactatttgcatctacaaacattgttgtcttggtgtcattaaaaattagtaattctttctttctgcatgacttaagtgattcagattctcatcctattttattgacccaatcattttcccaaaccaaaaccaccctccactcgcatactccaaattctgaaatataagaatttaattatttcaaccatatttcaaattagtttagaagagatttctaattcacacaaacccttatttcaaatattgttaaccataacatgtgtatccttcccttagtaagaggttcggtcacagacttcgacctcaagttctctctcagttttgattggcgatacgtatgaaatcacacataaatctgtcaagcatggcttcaaaggcaaaatcatcaagaataacaccatgtttatttttattcattgcattaggacgcatgattttgagtttggtaccatggacccatctttcaaaatgatccacctgagcaatcataatttgataagaacataaaacactaatatagaatagataaaacgatatatatgcataaaagtaaatgaaaggaaagaaatgtgatacctcagacatcagttttttacaaaattgcggttgaagcatttccttgaggatctacactttgctgctatgcagttctgtcttatcttctttaagtgtcattttgtttttggacagagcatatatgaattaatagcagtagttgttcatgtttgaaagcactaatttgtttaattagaacatatatgaattataattagaacatatatttgaaaacactaactgctttcaatatttctatatcgcaacattcatatcttaagtttttgttcttattagttactgaatttgtttcaatatgttttataataatacatcaatgtgctggagcaatcaatagtagaatagcacagctgcgactatagtgtatggcattggcatatcataatatatgtgtatgattgttggcacttggctttggctagtaatgagtaaacatcaaacatcaaacatgcgtgcgtgtcccatgaccttctatatatctacgtacaccttctatatatatatatatatatatatatatatatatatatatatatatatatatatatatatatatatacatatatatatatatgtaaaaccaaaaactaactcattttttatgttggaaagtctacggtgttcctcaaattctgatccaatgccttgacaagagctattattctctttaattgcatttatttataattacttgttaagaagcataagttaagaaaaatgttcgtcattcacactttacacactctttttaatatattatttttaattatgaggtgaattttatgtgagcattatcacttaaaaaatctagatcagttattttatttaataaggcacacataaatcgattcaacagtaataatttaataaagagttaaaaaaaacattgctacaaattgtgatggatttttcttatatgtttatagaaaaatagtttttcttccccaaatatgccacttggaatctagatgcttggatatatctacccctcgcagcaaataccaaacctatgaattaaattattggttgacatattgagggagagaaattcctcctgtaacataaaataacttctcatggaataataaactgcggaagtctgaccaaactatttgtaggatcatgtttgctaatggtgtgagttttaattagatttgtttagctagctgttacttaccagcatgtcatgcaattgaaagtgacggatacagcatatcggtctcccatgacgtcagtgacaagagaaggcttttcactctgccaacttcacaaagcctctcaagtttctctattgccaccttgtatagattagtataacaatcaatagtaagcaaaagagagagaagactaataataattatcccttgcttcttctcggttgtgctagcttctatcagatttcaatgtctcatctccctatttgtatgtgaatatgtacatcttagaagttccaagaatatgcatacgtggcacctccccaaattttagtgaaccttgttcttttggcaaaaacaaaaagaaaagggagggaatctaaacccatattctgttatttctattccatagtattacatcgatcatgttcatctcttcttttgtttgtagtatgtgatccaaaactccaatacatcatgtacatatcgaaattattatgcatcagttagttaactttattatcactaactaaatcttcttctaatatgaattagttagagaaattttcaatttttaactttattatcactctttactcttattgtttgtttcaatttttatctttttgttcccatgcccaaatatatatgataattcttattttttgattttataagaggatcctggagtagtaaagtttaaggagcaaaagacctcaaattcttacctgagatgaaatttctctttaaaggtactattgctattagttttgcagcatatgtaccatatgaagattcaagacaaaatgaaggattcaacatacgaacaaaaaagacaaatgataactataataaccaagttttctaaaaaaaaaaaaattaaaattactgtagctgtcactgtagctggcgctgatagcgtgggatctagtgctgatagcgtgggatctagtgctgatagcatagcactgtagctgaaggctatttttcatgatttttggcgcgattagcgccaggaacggcgccgtaagcgccagaatttgatctgtggcgcgattagcgtcagagatggcgccgatagcgccataagtgctctggaaaacactttttctctggattttggcgcgatcagtgccagaactggcgcggttagcgccagaagtgctccagaaagtatatttcctctggaaactggcgcgatcagcgccagaagtggcgcgattagcgccagagcacgtctgggtcagtataaatggccaaatcgcgtttttcaaaaggaaaaaccttcttttcttcttccccagctccattctgccattgttgaagctcccaagcttcatgaacccttgtttcttgaccaaaacacttcctttaacctctaatcttgaggaaaaacatgttgggagcttaaatccttcatcaaaaacccctaaaaagctttgattagagaaatccctttctcaagggaaatctgtaaaactcgagttcggcgagggacgacgtcaattcacggacacccgagcttgggagagtcattcctgagctttccttgtcattattgaggtaagaaaagtgtgtttagaacgttgtggtgatgaaggattagctttcaaatgttagtttggtgaactttgattatgggctctgagacattcatgtgtggctagtgtgtgttgagtcactggatatgttatgtcatgcaagagccttgataatggttttgatgtgcctgagaggccatgtgagcggtgttttgtgggtgaaatggaccgttcaagcctatgtgacttcttgagtcattggactgtatagagctttgagctctatgtgtttggcttgcattgagtctgtgatgactctaatggcttgataagttgagatagacgttgagggtctatgatatgctagtgactgataaaccttaagttagatgacttgaaggttatggagaggattagtgtttcctttcattgtaacggctgaagaccgttattgattgtttgtttgcatgtctggtgtaggacgtgagattttcactgttggtggtcgtgaccacgaagccgggagagccgatattgagctgagaacaggtaagctctttgcccttgggagtaattcccttgcttgtgttccaccatacccaagaagggtgatggttattgtatgacatgcatattgaaagttgtgttactgcttattgaaccatgtgattgatgaacactgtgatagtgttctgtgactgatgatgaactaaatattgtgatagtattgtatgatgtgattttatgagattctctggccagtagaatagggtactatggatccccttggaaatgtgcctttaagtggatgatcttccttgggaaaatccataggtgtccatataattcctgatagaatgtgcccatcatcggatgatctttctcaggtatgggcaggaaaagtcctgagagaatgtgcccttcaatggatgatctttctcaggcaatgtgttatggtttgactgaatagctgtgatgactaacttgtgataaaatctttgatattatgtgtgcatggaagtgaaccagggggaggaaatacctccaaggaccctgagtttgctgagattgtttatctcacccctattggggattatgttttgcaggtgaggctcagggagctgatgacagatctcagggcaagaggcccgcgtagagagagagatatggttctgaaggaaccttaggcatatagtgaagagcctgttggctctatattttgatattttgtctgtatgcctgtattttggcaactgatgagagaattgtatagttttgagaaaatatactttgtatattctaagatttcaccatatatgtatataatatacagattatgctgataatgacaattgatgacgtcattttgtctaaagcttccatttttatgatatatgatatttgctgcgctattctgatataataatatgttaataccttggatgcatacggggtgttacaataacattgataataacactgagattgaagtgaatgagcctgagatagacacgacaactcaaacaacatcttcgacaaaggaaagtggacagaggaagagagaaagagagggtgacaaaagaattggggttgctgccaagctttcctcacaattagatcgtgttattcaaacatttgaatctattgtatctggtaaacacccaacttgcattagtgcatgtgtagcaaagttgaaagatctaccgaaacttgagcgtaggagtggactattttacaaagccactagacttaggaaaaaaagggcaaacatgattacctttgttgctttagaagatcctgaactacagcttggctggatcaagtttgacactcgagcacaaattccttagtttcttctctatatgatatcattgacacttattagttttgcttagctatgaaccttggttatgtcatggatctttgtttttaatattggttatgctatggatcttggttatggtttggctcttgatttttattttaagttgtgtaatgactttttttttccttctacaggatttctttatcattatcatcaaatgactcatcattatcataaaatgactcttcatatgatgatgatgatcacattatgaagaaaaaagtgttgatgcttgttgtagctaatgttaccaattacttcatgaattatgttgtgaaaaatccatgtagagattcaagcatgacaaaccatcattgggcatctgaaattctaaatggtcatccaatacgttgttgtcagatgtttatgaagaaatttgtctttcttgaattatgtgatatcttggaaaccaagtacaacttaaagaaaacttgaaatgtcaaaatttagaaaccaagtacaacttaaagaaaacttgaaatgtcaaaatttatgagcaagttggcttgtttttatacattatgagttaaccaagttcgattcgtaattgtgaggaaagatttcagcattcaggtgaaacaatatctaaacatttccatattgtcttggaagctgtgtgtttgtttgcaaaggacataattaagccttttgatccatcatttagagatactcttgatgagattatgaaaggtgttagatattgcccttattttagggattgtattggtgcaatagatggtactcatctatgagtttgcgttctctctcatctacaaagagtctatattgatcggaaaggctacactaccactaatgtcaaggttgtttttgaatttagcatgtgtttcacatttgtttggacaggttggaaaggttctgcacatgatactaagatatttacggaggctttacgtaaatctgcattgtatttttcacatcctcctcaaggtacttaacatttatattatatatatatatatatatatcattaaaagtttgtattttaacatgtactattgttttattctttaggtaaatattatcttgttgattctggttaccttacttttatgggttttctagggtcatacaagaaaactaggtaccatctccagcaatttagaattgggcctagaatcaggggagagttgaagtttttaattattatcattatagtcttcgaattacaattgaacgtgcatttggtttgtgtaaagtgagatggaagatattgggtaatatgccaccttttgctttgaagacacaaaaccaaatcattgttgcttgcatgtctttacataacttcattcaaagaaatgataagagtgattgagaatttgattcactagatgaatataacgaatataaaaatagtgatgaggaaaataaaattgaccctagtactacaacatgggaagaaccaaatgctcaaagtactttacaaatgaaacgatataaagaatctctaaaaaatatgtttccaacacatttaatttctttgctttttaagaatacaaagtgcgatcaagggggtaggtggaaggatcgtagaagagttcaaagctattgaagatctcaacggtgtgacccttctggacccctatgacccaaccatagacccgagggggtagtggtggcgaaacgatgccattgttgtagttggcgttgttgttggtggtggtgtgcggtggcgtcaatcaattagttgacaagcaatgattttaggcacgcttttcagcacctttagctatagtacattcattatacgaaatcctaacacaggtaacaagaagagtagagtgataaattgggaggggcccttaatgcactggtagaacgatcatactatctatcatttagttatctgtgaataactgaaaatttatttggcctaatttcatgctacataagctttaaactaagctttacttgacatgactaactttcttaaaatgttgatcatacatttaataaaaaaaatccaatgcaatgaccttggtaatcaaaatagcaagtttacttcttagctaagagttgtagagattcctttctcacttctgacttattacagctagaagttgtgtctagctgttggttctatctgctttgatataaaaattcaccagtaccctgcatctaatataaaagttgacaaattcataatttttattttaaaccacgtaaagaaaaatatgcatatttgacaataaagaccaagagaaactcaaatagcatgatccagtggaggggcaacactaaattgaaagttcacatttcataataagacatgagaagagataccttgtagtaatttatctataagacattatttaccattcttattctggtgaaatacaagcagcaatggtccacaaagcaaacaccactattctggtgaaatacaagtatccaataacaacaatgtagaattgtctaaatagagtcattggatacttgaaatttgtctaattcacataaatgattatgccaatattcgataggcaccaagtttttccattatggacctaaaagtttaataacacaaggcaaaagagagtaaagatataaacaatttgcatgtggcaaacaatatatcgctcattatatgtcaaaagaagtaaattaactttaggtcctgtcccacatacaagtatatgcccaattatattaccttcatttacttcaattgatccatttcctttgcaccatggtttcctagcatgcaaaaggtaactgtcaatttcaattagcttcctctgggtgtaacactctattatccaaacctaatacccaaaaaaagaaaagaaaggataaatcatggaatatcatgtgagactatcatctgcaaaatattagaaaatgatacagctaagaatttgcatggcaggattagaatttccttaccaaaatgcttcaattaatacactaagtaaaaattcccttaacacaatcacctataatcttcaaacacaaacaatgtccaacaaccacaaaaaattaagggtgttacaccaattgacattgaattaaaagtggagctaaacgatcaaacccaggcttacaacgaaaatattccacgaacaaagaaaaatctctctgaaatttaagatgttaatgtattttcttgaccattaagataatagttttacttttaattttattagtctgtctatcaatatagtatatcttaactcttttataaacaatggaggtataaaaatgacacctagaaaaacatagaattaaatataagcagtgttttaaagaatatatagagaaatagcaatcacaatcgcattcatggaaacaaaacaaggaaagaggaaaacctttgacacaatggttccataatcagcttcaacttgtctaaacttaggggtatttggaaaggcacaaaccaagagagtgcaatcagagttccaatcaggcttatattatgctcgcatttccatagctcgtgacctcaacatgcccctctacggattcaccaaccttgaaagcacaaaaaccacctgttcatgtccacaaaccagttgctaaattaatgaactaaatttacattcaataacattgcaagcaaaaccaaaaacccacaagggcaccaaaattgttccttataaaccaagtacagaagcttgttgaagcttttagattacaaacttgaggtggaagattttccaccattttgattttggactttgcgcttgttgggtgtcttggcttcaccggatttctcacctttgccatccaaagttggtttctttgcattgttttcgctctcattttcccttgaactcgtccatgatggcaggctccacttggaaccattgttgttggcacttattccagtatcggacatggtaagaactactatgtggagggtgccaaagtaccaaatttgaaacctgcatttgggggtccaaatgaaattcgtaaattggtcaaaaacttcatgggtgaacaaagaagttctcaccaaaatcatggtgtctattgttgattcagatgaagtcaagcatcattgaagatcaaagtaaagagttttgtgctttcaacatgcaaaaggaagctttaagatgaagagttcaaattgatcatgtataagaaaatgtatgatctgataatccaatattgcataacatgcatcattcatacatataggattattaggttagtgggattaatcaaagaaaatcatttagaaaagttaaaaaatgctttaagtttttggaaaaacaatatttcaaaggaataatcgattaccatgttggtgacatcgattattttgttctaactgccttttgaaatcttgacatgatcattataatcgattactcaataatttaatcgattacaaaggcatacattgaaaagttgttctgactgccttaatcgattgccaaatattttaatcgattacacatatgttttgattgaaactatcattcaattttaatcgattacaggaaatcgaaatcgattaattgagctaaatagaaaaaacatgtcttactggcttaatcgattacgtattggtttaatcgattaaactattcgttcttgaagtcttgaacgagccataagcattttaatcgattacaatcttggattaatcgattacataatcgaaataatcgattacaggagctaaattaatcgattatttttggtaaaaattctgttataaatagaagtcactacgacagaaaataagaagaagagaattatcaagtgcttttgagattttcgttgagtgatcattcacaaacaatcagtgctttcattagtgataaaaatctgagaaagaaacattgtagaagcttcatagaatcaattactcatgaagatcatgtgttgaagtttttactttcaaccaaagtcaagaaaagttgcatatctgtggtgtgataatctgcattttcatctatgattcgttcatattcattcatcaatggattatcaggtgatatcttttcttgcttagtgattgggttttacaatttaattgtaatagtgaaatcttgtaaatctattgtaatgggtttctttcaagcatagagatagtgtttctctgggtttttcaactgggtagagttctcaggttgaaaggggtgtctctaaggatctaatagtgttttagattgctgaactttgtctagggttgacaaagagagatttgtaattttgcttgtaaagaatattttgcaatagtggaacttctctctggttttgagtgaagaactggatgtagcctcatagtgtttgaggtgaaccagtataaaatctgtgtgttctttaattttctcagttttacatgcttattacattgtttgtgaatcatattcaaagcacagtttgagatactctattttctggtgctcttggaaggggaagattgattgaagactgattttgttttaaagatttgttttgaatctgaaaattgatttctggtatcaaaagaatttctaataagtgataaagatcctatggctactctgatttaaattttaattgggcaaagtttttcaaccaattcaccccccctcttggttgttttaagtattcatctgtttttcaattggtatcagagctggttcttgtaagttactcaagatcactttttctttccaaaagtcatcatgaatacttcacaaataacctttagagagggtgcctctttgaacagacctccaatgtttgaaggggaacacttcagtttttggaaaaatagaatgaaaatctttattcaatcaaatgaccctggagcatggaatgctattgaaaaaggtccctttattcctaagaaaactgttgctaatgagttggttcccaaagaatgggatgagatgactgaggctgaacaaagaaatgcacagtatgattttaaagctaaaaatatgatcacttctgcactttcctttgatgagtttttcaggactgtgagatgcaaaaatgcaaaagaaatgtgggagatgcttgagattactcatgaaggaacagaagaggttcgaaggtcaagaaagcatgccttaatacatgagtatgaaatgttcaagatgaactccaacgaaagtatttcacagctgcaaaccagatttacacatatagtaaatcacttgctgggtcttggcaaagtatttgatactgaggagctaaacatcaaaattttgaaatgcttaacaagaccatggcagccaaaggtgacagccatcaaggagtcgaaggacctatctaagatgtccatggcagccttgtttggtaagcttcttgaatatgaattagaaatgtcacaactaacattttgtgaagatgcagagaagaaaacaagaagcatagcactgaaggctacagcaagcaaaacgaaaaagaggaagaattaagtgaagaagaggaagatgatgagcaagtgaacttgattgttaaaaagttcaacaaatttatgaagaaaggcaagaataaacgattcagcagaggcaacagaaatagcagcaacaacaacaacttcaacaagaagattgacaacaactttacatgttttgagtgtggcaaacctggccacatcaagtctgattgtgcaatctacttaaggaagcaacaagctgaaggaaaggctaagaaagaagctaaaggaaagaaagcctacatagcctgggaagataatgaatcaactacttcagattcttcaacagagcaagaggaagcaaacttatgttttacatccatcataattgaagatgatgatgatctgctcagtgaagaagatgaggtaaattctgaacttgatcaagccattcatgcttttcaagagatgtatgaggaagcccaaaaacttgcaaaagccaataataagctcaaaggaaatcttagatggcatatagaaaaaattacagatttgcaaaatgaaatttgcaacttgaaagaagaaaatgaaaaactgacttcaagttacaaattgaatggctgtgtgtgtgcttcttcatcaactaatgttgacaagtataaaaagcttttgaaagattttgaagaatacaaacaaagtcaaggtgaaaaatatatgttgcttttagccaaaaatagtgacttgattgatctcttgaggaagttttataaaggcaaatgcaacttagctgaaatgttaagtgtgcaaaagtatgctggagatacttctggattggggtacaaacatggaacaaaatcatttgggaaaacagtttttgtaccaccaaaacagaagaatcaaaagtggcataagaactcaagggtcaatcaatttgctgcatttaaaaaatcctcaaaatctgtaacttgcaactattgtatgaagaagggacacacttcttttaaatgctatgctaggagattctttgtgcctaatggtgattgcatctggattcctaagatcaaaagaaatgctaacccatacagacagacccaaccttgattgggtaccttcaataaaattctaatttgcttttgcaggtgtgtctaagagctagaacatcaatttagtatcttgacagtggatgctctagacacatgactggagacatgtcccttctctcaaatctgacattaaaagaaggaggatatgttacttatggtgataacaacaaaggcaagatcattggtgaaggaaatataggagacaacataaaaaccaagataaaaagtgtgttgtacatggatgggctaaagcataatctgttgagcattagtcagctatgtgataaaggctacaaggtgaattttaacaaagacagctgcataatatcagatgataaaaacagtgaggtactgcacataggtaaaagaaaaggtaacatttatgtgctttcaattgatgatgcattattccataaatcttcatgtcttattagcaaaatggatgaaacttggctgtggcatagaagagcaagtcacatgaacatgcatcacatgaacaagctcataagaaaagaattagtcattggtttacccaaactcaagtttgagaaggataaaatctgtgatgcttgtcaaaaggggaaacaaactaaaaattcttttcaaagcaaaaacattgtttccacctctagacctcttgaactacttcacatggatttatttggtccttcaagaactatgagtttaggaggaaactattatggacttgtgattgtagatgattactctagatatacctggactatgtttttgaaatccaaaagtgatgctttccttgcttttcgaaaattaaccaaacttactcaaaatgagaaaggcagtaaaatagtttcaataagaagtgaccatggtggtgaattccaaaatgatcattttgagaaattctgtgaagaaaatggaatcaaccacaatttttcagctccaagaacaccccaacaaaatggtgttgtggagaggaaaaatagatttcttgaggaaggagcgagaacacttcttaatgaatctaatttacctaagtatttttgggctgatgcagtaagtactgtgtgttatactttgaatagaactctcataaggcccattttaaagaaaactccttatgagctatacaaaggaagaaagcctaatgtatctcatttaaaagtttttggctgcaagtgctttgtgttaaacaatgggaaagaatcacttgggaaatttgatgctaaggcagatgaagcaattttcctaggatattcattgcatagtaaggcatatagagtgttcaacaagagaacaatgtgcgttgaagaatcaatacatgtgatttgtgatgagactaacacctctaaggaggaaaaagaaaatgatgatgcaggtcaactggaaataaccgaaatgaaagatacctctgtcataaatgaagatccaaaagcagaaaatgaatccacaactccagttcaattcagaaaagaatggagaacaacaagagacttatcaatggacaacataataggtgaagtaacaaagggagtatcaactagatcttcacttaaaaatctctgttgtgatatggctttcgtttcacaaattgagcctaagaacattgaacaagccttgtgtgatgaacattggatgcatgcaatgcatgatgagttaaatcagtttaagagaaatgaagtttgggaacttgttcctagaccatcatctcttaaacccattggcactaaatgggtttttagaaataaacttgatgaaagtggaatcatagttagaaacaaagccatattggtagccaaaggctataatcaagaggaaggcatagactatgaggaaacttttgctccagttgcaagattggaagcaatcaggttgttacttgcatatgcatgtctcattgatttcaagctttttcaaatggatgttaaaagtgcttttttaaatggatatattgaggaggaaatctatgttgaacaacctccaggttttaaagattttaaacatcctgattatgtttataaattgaaaaaggcactttatggattgaaacaagctcctagacagtggtatgaaagattaagcaagtttttactcgaacaatcctttactaggggcagtatttataaaaccttgtttatcaaaaggcttggaaatgatttcttattggttcaaatttatgtggatgatataatatttggatcaactaatcatctgttgtgcaaagatttttcatcaggtatgcagaaagaattcgagatgtcaatgatgggtgaacttaccttttttcttggtctccaaataaagcaaatgaagaatggaacattcattaatcagtcaaagtattgtctggaaataatcaaaaagtttgaaatggagaaaagtaaagatgctgcaactccaatggctacatcaacatatctagattcagatgagcatggaatgaaagttgatgagtcaaaatatagaggaatgataggatcactcctgtatttgacagcaagcagacctgatattatgttaagtgtgtgtctatgtgctagatatcaatccaatcccaaggagtcacatcttactgctgtcaagaggatcctgaaatatctcaaagctacaccaagagttggactttggtatcctaaaggtgcttctttaaatatagttgattattctgactctgattttgcaggttgcaaattagacagaaaaagcactagtggtacatgtcacatgctaggaagctctcttatttcatggcattgcaagaagtaatcatgtgttgctttatccactgctgaggctgaatacatatctgctggaagttgctgtgcacaaagtttatggctcaagcaacaaatgcaagattatggagtggaacttaatgcaataccactgctgtgtgacaatacaagtgccatcaatatatcaaagaatccagtcatgcattcaaggacaaagcatattgagataaggcatcattttctcagagatcaggttcaaaaaggtaacataaggtagacttcattgatactaaaatcaattagctgatattttacaaaaccacttgctagagatagattctatacactaagaaatatgctaggaattcttgatgagaataatcttaactagcttatcttgtttgtggcttatgtgctatttgaagagttgataaatcatggataaccattatgtagtaaattgagaaattagctgctaaactgctctgttttgtaaaatgccctgagataatcgattacactgcgtattaatcgattaaatactttaaagccttatactggtatgaattttgtaagtttgtaatcgattataaaaaaggtaaccgattattcttctaatcatcagaagataaaactctctggaataatcgattacactttgaattaatcgattactattgttaagaacaaaaatcaaaatcagacgagtcagtaataatcgattactgaaagctgtaatcgattaccttgtacatgacttgatataaactgtctgtgttaatcgattaccacacgggataatcgattacttagagttctgatacattgttttcatggctatacttaaaataatcgattactgtataaagaaatcgattacaggttgtcttcaacctctgataattgatataaaagaatcgattacctgaaaatattattcgattacgttatttttgaacagaaagctaaattgaactgaaataatcgattacactacgtaataatcgattatttgatctgttacttgaattctgacgcattttctggaattcaaaataggatttttaaaatgcctaaatcttctctctgtcattaaaacagttacaacagctatattttcaaaattctgaacgttaaggagtcttactaagtctataaattgagtctcacatttcatagagtttacacttaaccatttattcctactaaaactctgtctctctctgttacattcctcatcatgtctgaaccaccatcatcaaaaagagttagaaaacctaaaagaagactaggagaatcatcctcaaatccacctcaacctcaacctccacaacaacctgtagataggattgatattggctttcatcagaaaatgataagatgaattacttgcagtatagtgcaaccaaacttgttgttgtacccaaatatattgaggtagactggcttattaggcaaggatttaacttttcaaccttgttagaagaacaaagtctaaagaggtttgtagaaatgaaaggtactttttatcctgatcttgttcgtgttttctacacctgtttaaaaggctctatgcaaggtgacataaaatcaaaagtgaaaggagtcacaatgcatatcactcctgacatttgggaaactgttgttggagtttcttgtgaaggaacaagaagatttgaagaagagccaagtggttataataaaatggagacatacagaagtatgcttcatgatcctcaaatgagacttagaaatcgtctcagtactgggcctatgaaagctgaagataggctgttgcattatctcattacatacatcatcactccaaggagtacaaatcatgcccaagctacagatgatgatttgcaattagtttatgggctgaaaaatcacatacctatgaactgacctctgatttttgctgaaatcatgcttaaatctaaaaggttaacaaactatccttttccctatcctgtattaatttccagacttattgatcatttcaatattgatgttgaaaatgaagtgatagacaacaccctatcctacaatagtaaaattaaggaaaaacatcttacaaagatgggtatgagaaaaacaccagaaggatgggtcatggctgctcaaataggtgttgctgagcaagaagaaatggcagaagactctgcaaatgaaggacagcaagcacaaccctcccaccaagcattttctgattttgaatctcttataattcaaaagatggattctatgctgaagcttcaagaggattttaaaactgagacaaatgaggctttggcagatattaaagaaagattagaagtaattgaggcaaatatgcaagaccaaatctctattccatctcctgagatttagaatttatcagatattgtagtttattttctctttctattttgtaattgctttatcaatagattattgtacgttttattctctgttctttgtttgatcattgtgtctattagtattttttgacttttaacaagccaaatagggggagagtaagatcaaaacttcaaaacagaataagagtaagaacaaattcagattaaaacttcataagattacaataattcagggggagtaacaaaaattcagaaataaaaagatagggggagaattaaaggaaaattaaatttctactagaagaattgaatgttatatactataattgagggggagtaatttgaaatcaaatctggacttgaatgtttaaatactagtgaatattttaacacttgatttctggaaagaatgttgaaaggtacaggtacttgcaaagcttcatcaaagatgatcagtatcaaaatgtttatttgaatcaattgaagaatcagaaatttctcaggactgcatgctcaatcaatttgaagattttgagaatttggcatgtcaaaagacaaaaagggggagattgttgattcagatgaagccaagcatcattgaagatcaaagtaaagagttttgtgctttcaacatgcaaaaggaagctttaagatgaagagttcaaattgatcatgtaaaagaaaatgtatgatctgataatccaatattgcataacatgcatcattcatacatataggattattaggttagtgggattaatcaaagaaaatcatttagaaaagttaaaaaaggctttaagtttttggaaaaacaatatttcaaaggaataatcgattaccaggttggtgacatcgattattttgttctaactgccttttgaaatcttgaaatgatcattataatcgattactcaataatttaatcaattacaaaggcatacattgaaaagtttttctgactgccttaatcgattaccaaatattttaatcgattacacatatgttttgattgaaactatcattcaattttaatcgattacaggaaatcaaaatcgattaattgagctaaatagaaaaaacatgtcttactggcttaatcgattacgtatcggtttaatcgattaaactattcgttcttgaagtcttgaacgagccataagcattttaatcgattacaatcttggattaatcgattacataatcgaaataatcgattacaggagctaaattaatcgattatttttggtaaaaattctgttataaatagaagtcactacgacagaaaataagaagaagagaattatcaagtgcttttgagattttcgttgagtggtcattcacaaacaatcagtgctttcattagtgataaaaatctgagaaagaaacattgtagaagcttcatagaatcaattactcatgaagatcatgtgttgaagtttttactttcaatcaaagtcaagaaaagctgcatatctgtggtgtgataatctgcattttcatctgtgattcgttcgtattcattcatcaatggattatcaggtgatatcttttcttgcttagtgattgggttttacaatttaattgtaatagtgaaatcttgtaaatttattgtaatgggtttctttcaagcatagagatagtgtttctctgggtttttcaactgggtagagttctcaggttgaaaggggtgtctctaaggatctaatagtgttttagattgctgaactttgtctagggttgacaaagagagatttgtaattttgcttgtaaagaatattttgcaatagtggaacttctctctggttttgagtgaagaactggatgtagcctcatagtgtttgaggtgaaccagtataaaatctgtgtgttctttaattttctcagttttacatgcttattacattgtttgtgaatcatattcaaagcacagtttgagatactctgttttctggtgctcttggaaggggaagattgattgaagactgattttgttttaaagatttgttttgaatctgaaaattgatttctggtatcaaaagaatttctaataagtgataaagatcctgtggctactctgatttaaattttaattgggcaaagtttttcaaccaattcacccctccctcttggttgttttaagtattcatctgtttttcatctatgcagttgttgttttacttacatagttacatccaaaatgaataaacttggcaccaaatttgaataaagagaaacaaaacgcaagggaaattctcttgaattctgagattttggtgagaccaagtcacaaagacaaagcaagcagtgcaaaatggggtgaggtgaaaacgggtcccagaagaaaaaagaaggtgacccatttttaaagacgatgagattttggtgaaaccaaatcacagacacaaagaattgtaccattcttgtccaaaaatggggtgaggtgaaaactagtcccaaaccctctggctcaacagccagagcgcagagtgaagcggcagcacgtcaacgttgtggcaggtgatgagggaagggaaggcttcctagaacaggataacctcagactccacaaagtaggttgtggcagatgaaactaaaatgatgtcgtttggggagaaggagaaggtgacttggacgccgatgttgtcgtgggaagagagaacgagtgcggggtgccatttgtgagggaagcgggcggagacggtggcggggcatgtgggatgggcgtgggtgtaggtgggaagggtgagagagctgcgttgtgagagattgagagaggacgcaaaaatgaaagcataaatggtgagggttttcaaagacggtaaaccaataaaccgtctttgaacacttttaaaaaaaccacgcattctggaggcaaaaattaataaataatataaattaattatttatttatcaaaaaggggcaaatgaagcaatatttaggcatttggggtaccctaacacgccctgcctaggcgtgtttaaacacgccctggctaggagtgttagggtcccctatgcctatatattgcttctgaaaatgacatttaaggattccgccttctctctataaagtgggtgttgatttctctgaagcgaagccctgccgaatttgaagcgctgccgacaagtaagtcgatttaactgattgtgcatagtatttagtttgttatatttttaaattagaaaattgttaggatcatatgaacttgttagcgacctagatattatgttagtgagtatggttttagttattccggtttagtttttggggtttatggtgtgattaggggttagggtctaggctagtgattagggttatgtaattcggtgtaggattcgggtttacattgttattagtgtttatggcttggggtacatacgtaggttctgggtttagggcttatggattgtgattagggttgagggcctggggtagtgattagtgtgtacgtaatgcagtgtacatttagggttgacagtgtgattaggatttatggattgtgggtatagacttagggtttatgggtgccggtttagtgttcagggcttatgttgtgatttgggtttaggccctggggtggtcattagggtgtatgtaaatcgggtttagggtttagggtgtatatggggattagggtttatgacttggggtacagagttagggtttgtggatgttggtttaaggtgtaggtcgtatgctgtgattagggtttagatcttcagttatagatgtggggtttatggatttcggggtaggttaggggtttacattgtgattaggatttatggccccgggaacagacgtaggatttattgtttaggatttagggtttaggatgtaggatttagggtagctcagtaaaccctaaagcataaaccctaaatcctatacaataaaccctaccccctaaatcgtaaactcaaaaccccacccttgaactcaacgtagtgactagggagcaatgcggtggtggcacggtgggcacttagcaccgcagtgggcaagagagtaagggttcgagtttgagggtttaggcgcgtgggcaagggagaaaggagtaaggaagtaaggtagcaaagtgagaggtagatgatcgtttaggcgcagacctcttttgggaaaaaattttgtgcaagtcccaccctcgaactcgacgtagtgactagtgagcaatgcggtggtgacacggtgggcacttagcggcacagtgggcaagagagtaagggttcgagttcgagggtttaggcgcgtgaataacctaatgaatgttacatacacttcactaatattgagtaattagttttccaattcaagttttgccttggcaaacacttccttttgaaatgacgaagatgagtctctatcttctaggtgtccaactgaccatgttttaattgcttttctatttcattgagcctggggtagtgattagagacctgttcacatagcaattgtctatgccgatatgatgcttcaagcaaagcttcggtgttgacatagtcatgttggagttgagcaaatcccattttgtcctcctcaaagacatcttagatttacaagttgaaagttgagtttgttgattatctctgctgaaggcagcctttaaaaaagtaataaacaaatgtttcattacaagttatttacttatgacatgactaattgtgatgagagaaaggtatatagcatattgacatgactactattgtattggtggaaactttctttggcactatagttcagggtcaggtgaaacaaaaacacacagacaaataataaccaaagaagaacatgagcacagatcagatagaaaaacaattattggaacaagtaggaatagttatctgtttaggaacaattattggattataggatgggaaaatgcctgtaatgatgacagatagaatcaacctgaggtctttagtgtttcaagctttgtgttggattacggtttagtctgagggcttatgttgtgattagggtttagggcttatgtttttttacttagggtttagggatatcggctaagctttcgggcttatgttgggttagtgtatttggtttaatgtatttgatacataagaaaattttgttcaaatgatttgttaatcgttaatattttgtttaccgtggttttaaatttttgtacatgaagatactgaatagatggctgattcatcctccacatcatcatcgcgatctgcatccgaccatgaggctgagcccatggatcccactgcctatgttgtccctaccccatacaagtggggcactctgcgtaggcgtattcagcgcacgcacatttacaagttgtgtggaacgggggcgtgccacctcaggtattgaagactcgacgtggtaaagtgagcggtggaccagatgcggacgatatacccgatgttgtttctgacatgttgcgcgaagctgagtttcttcatgtcgcacgcatgcgacatatttaggtatgcaaccatgcaactatgaaatgagttaagactggttaatttgataaatgaagttgtttaataatttttatgtatttcagatggatgttgtgcttattagtgctctggttgaacgatggaggccagagactcacaccttccacatcccgcaaggtgagatgaccatcacgttgcaagacgtggctggtattctgggattgcccatggagggcaatgtggttactggattgacgattgacgagtgggcgatcgtcagttaggaggtgtttggtcacaaacctgaggaggacaccgagctaaaaggtggatatttgcgcctatctttctttgataaacattttgcgcattggggtgatgtggttcccgacattgttcacgtgatgcggttcacgaaggcccacattgcacgacttatcggatcatggctgctgtgcgaccgatctagaggtagcatgattgcagcacaatacatgtcgttgcttgcaggggattttgtggacatcgaccgatatagctggggctcagctgtcctttcacatttgtttaaacaaatgtgtgagtgtacagatccaggcaggagtgacatcggtgggtgtcatatgcttcttcaggtgtaggcgtggctgagattcccaccaattcctccagctattccgttgcctacacaggcggactggcattttggacatcggtatgtgtggctatatgttgttcttgtttacaattgtaacaatgaagtcttatagtatactaacattacttattttgaaattaggtttaacgctttaggttgacttaaaccgcatgaactggtcatgtataggatggcattggactcccttactcgaaatgaggtacctatagtagtttttcaattactatacgtttgcatatatggaacatgctatgaactaataaagtgttattttgttgtgtgtaggtcgtttggcaaccatacggggactacgactttcttggtgcttctgagcgtgagcgactgctgtggatggcaactacgcctatcatatgctttcacacagtagaatattcccagtcggatcgatgcatgcgacaattcaggagggatcagccaatcccacgcgctcccaggaagctgaagggtgtgcatgatctttcgctttgggggaaacgagaagacaactgggttcgtaaactcagaccatttatttcgcgatgggatgttagggaccagcacattgagctttcccccttgattcaggggttgctgtcaccacaccatgagtacatggtttggtacagagaacacgggaagcgatttatcacaaagaagggcgcgaagaccgatcgtggtgtaagtttcttcacatcctcatttgtctatttaaattaattatactacatgacatacttgacacttatgtgtatatatttaaaattgtaggtcgatggactggaggctttttacttcgcgacaagtagccccgataggaaggccttcgacttcgattgggctagtgaggaggtcggtcggttaatgtccgtctttgccgagagttgtcgcgtggaggaagcaggcccacatgctcccgaatcccagcttcagcccgaaccagagatttcagttgcagttggtcaacgaagaaaagagggtcgtgggctagagcgtcggcggagaccgatggagtaggttcctgagcccattgttcgaccgaggccgcgcacggagggttactataggcctcctgttattgcatcgacatatgggacacaacccgtatattatgaggctgctgcgtaggggggcatgggggcatagactatggcgatttcagtactgaagcccaaatgcttacaccaggcccatcgtagacccatgccgcatatgttacgactgcaatgacatgtgcagatgtagatggcgggatctataataacctagatttttttataaaaagaagtaaaaggaataaatagcttccttttggtaagtatatagcttatgtgccttcatgaggtgttttagtctagaattgatggttagcaggtgaaaatagcagaattaagccgaacagaaggtaccgcgccaacaagcctatatactaccgggggtacataggctaattctacatgtggcgccaagagcgccacctgtgctggaagttgggaccctatatctaggcctaatcacctccctatgacctttaatccctagagaaacctttgaaagcttgaatccttcaatttttgctcttgaaaaacccctttgagtgaggagtgatttctcagaggaaacactcagagaacttgagattggcgaggacccacgacgtataaaggacgctagagcttgaggaagctgtcctgaggtcttttgagtcgtcactgaggtaagatactcaagtttctccgttaaattttgatcctgggggttttatgaatagtgacccatattagctggggctagaattagcccagggtcctgtagagaaacttgtttagagcgaggaatagatgaaggattagctttcagtttttgattttgatgactttggattttggctctgtggtggcatgtgtcaattatgtagagtcacttatttatgattcttgaacatgccagagccttgattatgtgatgttctgagccgagaggctagtagagcagggctttgagtgaaactcagcccgttctgatgataattgagttgtggggctgaggaaagcttaggatatatataaatatgtagtgagtctgggatgactcagatggcttgtattcggccctgatggaccttgagtgattctagagcagcctagtgtaggctgagtttgattgaaccctaggataggggaattctaatataatatgttttgtgaattgtatgcctgatggcttattttgatatgaaatgtgcatgtgccttgattaggctttgattctgagagtgttggtggcgggagccacagacctgggaaggaactgcagactgagaccttaccaggtaagttcagtgtttttggggttgaactcccacttggttgcataccacactccgggggagtgttggtcatgattcatgatgcatgcatttgctgtggtattgcttgtattgatctggtatgcatctattttggatatatgtatgctatgactgagatagatctgttggccaatagataaatacaggcattgagggttttctgtcctgtatttaggcattgagggttctccaccaggcattgagggttctctgccatgtgattatgcgttgagggttctccacacgacgttgagggttctccgccaggcattgagggttctctgccactagtatcgagcagatggctgctccatgttatgttgaaggctagagggccaggccaatgggccatgtttgagatgtttgcctgatatgtgtgtattatgagttagtgggccagagtgggaatgatttcccaaggactctgagcttactgagatatgttatctcaccccatgtggggttttctatgatttcaggtgatccttctagaagagaagatcagtctcagggcaagaggcccagcagagactaggttgtttgaaggaggagcggcattgagagcttgaaggctctattttgattttgtttctattgtatagttctgtattccctcgagaagggcagttattattttgtttcaccacggtatggtgaagactctgatgtatatggttatgtacagaactatttgggttatgatatgagactttccctgagtatagatctattgtgtatgtgataatctgcctaagtcttgtagtaatctgtcttgatgttatgatatgaaaaactggatcagcagaggcgtgatatatgttatggtttgcgttttaaacactggaatgcattcgcattcagtgtgttgctggaatgcattcgcatatgcatccacaccagcatcttcatcattatcggacgcactggcattctcctgaagaagacaatcttccatcgctatattttcatcatcatcatcatcgtcatccataacccaagttaggtcatgtgaatcttcctgagacatgtttgcacctacaacatcatatgatggtgcaatatgtgcagaattacaaacaactgacctcctgggtaaaacagcttcctgaactacggtgtaatccacatacaactctaaaaatttcttccgtgcctgattaaaaaattcttcaatgaccatttccaattcttcatcatcctgtattggaaaccccatgtattcatcttgctgccatattcttgccgtcacacccaattttggacgtatcttttgatgcaaatcactcaatgttgcatttcggttgattcatgtcatccttttctcccctccgaagacaacacctcttccccttcaattttccttccattgaaaaaaaaccacaacacgaacaacctccgcatcacttgaactcatttcctgcaatcaacataaataaatagggatggcaaaacgagcttggcccaccgggccggcccgcttagcccgaaaaaaaatgcgggctgggttgataatatcaacccgcaaatcaaaagcgggccgggctggcccgccccacaaaattgcgagccaaaattatttaaatattatttaaataattaaatattaaatattaaaattaattaaatatatttaacatattttgaaataagtatattctttaaatttatactcttttgcactctcataattaacttctaagttttaatattaaaatggttatgataatgatactttcaaatagtctttcattactagcatattacacttttggacagtttataaccgtaaatttcatttgcaaatggtgtaattttgtgaattatcacatgacatcatttatttagcattaattttaaattatttatttttatttaactttgtgttttttaattatcatatttgtattttattataattttttgtattttattttttaaattgacttttttaattttttatgcgggctggcccgctagcccgctggcccgcattaaagaggggcgggctagcatttctagcccactttgcaaaagtgggccgggccagtctgccccgcatttttcgcgggcctggccggcccgccccgtttttttgcgggccggcccgtttgccatccctataaataaacgtcagaagcacacaaacacccgaaaccctaaattatgaaacacaaaccctacgtactaaacaaaccctaacccacataaacgcttctacagatgtagttagtccccagtaaatcaccaaatggtgaaagaaagtcaatattgtcaaagacacaaaggcatagagaagtggtcttgtttacacaacaacctaaaccctaggtccagtcacgccaagccatacaccctaaccaccacatacgccttaagctctacgacggataccctaaaccctaggtgtgttccccttgacctaacccctaatcaccccataaaccctaaacacttaagccggataccctaaaccctaggtgtgtacaccaggccctaaaccctaatccacccatgcccctaaacccttatgctgtaacacttaaaccctaggtgtgtacccccgtacctaacccctaatccacacatgcgccataaaccctaggtgtgtccatcaagacataaccccgattcaccccataaaccctaaaccctaagccggaacacttaaaccctgatcaccccataaaccctaatgacaatttcaacactaaacctaaaccctaagacataaacatatacactatgaacctaacaactatgtcgctaacaactttaaataatatgcaacattgtttagggtttagaacttacttctttccagcgctaatcttcacaaaatatcctatcccaagctgtagatcctgaagcacagcaacttcaacacagaaccctaattacttgtcggccgcgcttcaaattcggaaggacttcgcttcagagaaatcaacacccactttctagagagaaggcagacctaattatagagagaaggcggaattgtacaaagtaattttaacgggcaatatataggcatcaggggaccctaacacgcctagccatggcgtgtttaaacacgcctaggcagggcatgttagggtaccctagatgcctaaatattgccccatttgcacctttttgctaaataaatatttaatttatattatttattaatttttgcccattctggatggacttatattaaaaatttcattgatttttaagacagattaggggctatgcgaaagatgttgtcgtagaaagggaaagtttattattagttataagtcaaatgatgaatatgatattttggcaagaaaacatggaaaacctcaggaaaaatatgagaaaattgatgaaaatggttctgtaacttactttatttcgcttttgcattaaaatttttagtataatttaagtcatacttcatgtaaataacgaggttgtgtttgcgtgactgtaacctggaagtggcctcgaaaatgagggcctcagattgagcgtggtgggccagtttgtggaggaatgcagtgagttcagccatggtggtggggttccaactaaacatggagcttcgctcattctcgtgtcaactatgcaagaaaggaaataatttagtagtaaagcctcttaactgccaaaataaaaattaaaaaagaaagagttggggtgaggtgagaggattagcaataaaataaattgaatagtcactatccatggtattaaaaattaaagaaatcaatgtggtttagcatgaccaacaaataacttagccgcttaatcatgtattcagagatttcatctttaggttaattcttcaaataaacttcagtacttcctattcttaactttcaatcgaaaatactttgggttataaaaaaaagtaaatagaaaacatattaactgacgtttttcaacttggaaataaggactaaaagacatgaacattctggtgatattctctttccttttttttctcattgatcaactgtctgacaagaggttctaaccctcttgaggagttttctgttgtggggattttcttgtgtctccatgatggagactccatcatggtcaaacaaatagttggacccaaagcaaaaaaaaaaaaaaaaataacaaactggatcaaacataaatgataattaaccaacaaaattgtgaaaaatctacatacgtttacaaattaagacaaagatgaatcatgaaagcgaattaaaaacattcaatatataatcaacatcgtgaccaactaataaaaattaagaaatgttgaatgaagctgattgagaaaatctaatggttctctgttatttcattcagaatggaaatacaccaaggattagggcctaacctcccaatccagtttctccaatgcctccctaatcatcttccctcctacttaactactatatatatgtagttaactaactccactgtaagtgacacctgttagttacattttacaattgctttttaaacctcccatgcgttctagccccatacacctgctgtagagatggtctaacaatacccccccccaaaagagccaccttgtcctcaaggtgaaaagtaagaatctgttgctgtaaaacttccatttattcccaggtagcttcaaactcagggagatccttccactgaactaacacttcaatttttcctgatgaagaatttcgcactgctttaacctcagcaggttctaccttgagttctagctcatcactcaacattataggtaaaggttgaggtgtgactacaggagaaagagcttttttcaacaaagatacatgaaacactggatgaattttagtttcaggaggcagcttgagctgataagctattttccccactatcttagcaatctgataaggtgcatagaatctaggacttagcttcggcaaaagaatcaaaataatattttttttattaaatatttaccaaaaggggctgtctgtaaaatatttacaaaaacggggctgtgtaacaaggattaggcatgttacaacacgcctagattgggcgtgttgtaacatgcctaatctaggcatgttgcacatgccccatttctataaatagcccccccccaccccatttccttcatatattggcttgcagtgttctgtctctgctaaaccgtctcatattctggtgtattttcattttttcagagatttttgaaggtgttctgagtgatgagaaagatgagttcaagtggtaattctgtttgcgttgtcttatattggaatggaagaaaatatcaaggccaacagggtgtcatttttgaaggggaaacacaaggaaccactgtgagacgtacatcaacccttactgaattgcatgaaaagatatggcaaaaattacatctcaatagcaaccagtcaatcactttactgacgggaagattatggcaacacgagaagttcatggggcttcaaataatggatgatgaagacgtggagttggtactagatggattttgcaaccagggaaggaaagattttttggagttgtacgtggatattacagaagttgatgatgttgttttacccatccaagcagttccacatcatacatcatcatatgctgctggagggccattgtatgctactggaggggcatcatttgttggcggagaggtcaacgtgtctgaggaggattcacatgacccaacttgggtcatggatgacgatgaagaggatgacgatgatgaaaatattacaatggaagatcggcttcttgagaaggatgctagtgcgtcggacgaggatgaggatgctggtgtgcatcaagaagatgttaatgtggggccatgtcaaactagtgatcatgcggagggtggttcgagtcaaccagaacaaggtaaattagctgaagatgtgaattataatggtttgtcatttaatttgttttatattggttattaatatgttttttaatgtgcatcaaatgatgttattttgttagttaagtttgttgactaaatgaattaggatggttgaattttgttttatattgtgtttgtgctttactgtttaggttaaatagttagggttatggacggtttggttggggtttaaggctttgtgttgagtttagggtttgggtgaggtttagggctttgtgttgaggttagggttttggtgtggtttagtgctttgtgtttagtttagggtttggttgggggtgagggtttggttggggtttagggtttggcaggggtttagggtttggttggggtttagggttgtgtcggcaggcgtacatggtgtttagggttagggtttagggttggtcgtgcttttgagttgatatcattaattaaactgacgttgaatgtgcagctgctgaggcgattcctttttggcaaggaattccacattatacatatattgattggagttacctacccgaacaagactcttttagcggttctggttcgggttcaggatcagtgcagggtccgtggcaactaggggatgatttgtttgtcaaacaagaatttgactcgaaaaaaaggtttagaaaaatttgtaaagaaaattatgttgatgtattttttgatgttgcgggttatacaccctctatggtcgagtttgacatcgcatttgcacaatttcgtgagaccagtgttgaggttgcggaatggatcgattccatccccaaggagaaatggacacgtgcatatgatgtggaggggagaagatacgaccacatgacaacaaacttggctgaatcagtgaacagggtgttgaagggagctaggaacatgcctatcacagctcttgtcaaacacacgtacatccgactggttcagtattttgtagacaaaggtgaggcggctgccgaacagcttcagaattcacaacgatattgcaaaaatgtggttgaagcaatgaggcgtaatcaatccctggcttcagggcaccatgtacgcagatataacgttgctcgaacgttattttaggtggatgatgggtgcgacaagtcatattcagtgtcccttgccgatcgggtttgtcagtgtgggaagttcaaggcattcaaatacccatgcagtcatgctgcagctgctgctttacatgtgcgccaaaatcctttttagtacgtggacgacgtcttccttgtaagtacgttggtgcaggcatattcagcgccatggcaaccaataggtaatgaacgggccattccaccgggtgaaggtccagtcatcatacctaacaaatcaatgctgcgtgttaaaggtcgtccaaggtccacaagaatacgtaacgagatggatgaagtggaaacatcccagagacgtatgaggtgtggcatttgtaagcaagttggacacaaccagagagtatgtcctagtcgtggggggacttcatgattttctgaatggttgtattttttttttttgctagtgtttgttaatgtacaacgttatttgatattttgtattaactttttgtttataacgttttaatactaatcatctttgatttttttggttgtctgataatgtaacaatatgttcattacacgttgtcaaacaaggtcttacatcatacgcacaacttgggcgtcattgaagacgcccaagtttgggcttcattcaacacgcccaacttggggtttgactgaacacacctaacaaataggtgtcattcaacacgcccaagttgggcgtgactgaacacgcctaacaaataggccgtcattcaagacacctaacttcggcgtgactgaacacacccaagttgggcgccattgaggcctatataagtcgcatgctcggcactcaaaattcaatgtgtatacgatggcattcttaggagaaaccagcagtcagaacattggtaattcaaaattagcgttcatttatccgaatggatcaacgaagcatgacaaaacaggggtttctttccaatgtgcaactccaatttcaatgcgagttcctgatgactgttcgtttcaaaccctgaagagtaggatgcagcaaacccttgttcttcctgatgaccatgttgttgacaacatctactatcgacaaccatcgatgcatgcaggtcagcactatttttttacttctgtggcactcacaaatgatgatgatgtttgcagaatgttaaggtgcagtgacaatatgtcgagtgctggcccaattgaaattttatgtgccatccacagaacacccgatggcatactcaacctacttcaatccacaatcgttccaacacatgatgtaatgctatattacaatggaaagtggaacataccccccgaagagtcggttgtgtaggttatgcctttactagaacaaacccaatacgatttcaaattccttctgcatgcaccatggaaagactgaaggctgttatcaaggaagttgcgccggttggatttccccctgatgggattcacatgccacaggtggtgagaaaattgttttttcgacagccacgccatgcacaatattcgaccaccacaatcgaatatcacataaaagagttgacaagcgatgaagacatgttgaagatcatagcagaatcgaactactggaaacgtttttgtccaattgaaattttagccatttttagcaaaccggacatgcagattgaatgaaaaatgtgcgttgaatatgttgtattactttattgttcttattacaaatgaacgttatgtttatggtttatggattcctgtttagggtttaggcctaatattgtgattaaggttaaggtcttcggttacagacttaggggtattacatacacttcactaatattgagtaattagttttccaattcaagttttgccttagcaaccacttccttagctgcgattttctttgcttttctctcttcactttgcttcctggccacttccattttgtcagctgtttcgttgacattagagacctattcagatagcaattatctatgtcagctgtttccttgacattagagacctattcagataccagttgaaagtggagttcattgattatctctgctaatagcaagctggttacattgaacaggaccattacgaatacttgtctgcttaggaacaattattggattataggatgggaaaacgcttgtgatgatgacagatagaatcaacctgaataatactaaatcaaagtggacacaaagggcttcagtgtggggtgtttcaagctttgtgttgaattcgagcattccacatacataatagttacactacaaaataaatagcacaagcaaatgtaacatacataatagttacaatacacatcattaaaataaatggtacaaacgaatggtacaagcaagcgactaaaactaagacgatggtggccactgttgacgacgcgcttgtctatcagattgcctccgtcttcgaggccgctgggaactgcctgcctcggtcgggtctgcctgagaggggcctgcatcatatgctgggacatatggagctggacatggagtgccctggtctgcataccatggcataggatgctcagtagcttcgggcacatatggtgcatctgttgcccaacccgcacaacctattgtggccatatcaaactccatgagcatctgatcgacgtttgtatgcgtccaatcagtgggaacattcccaaagccaacgtcttcatattggccctgcgtcggatcagtaggatcatggtaaaatatctggctcccatatgtcgattcaataattggaggcctataacaacccggggcggcaggcccgggaccaacaatgggctgcggcacctgctgaataggtcaccgtcaacgctctaggccacgtccctctcttctgcgatgaccaacttgaagagacaattatggctcctcctcaagctgcgtctcgggagcttgtggtccaaactcctccacctgacaactttgtgtgaagacagacattaggcgacccaactcctgattggcccaatcgaagtcaaacgtcgtcctattctgtctgagtgtcgtgaagtagagcatctctatcccatcgacctataaattcaaattcaaatatataaacatcagtgtcaactatgtcaactatgataatgaatgtaaataacataaaaaaattcatcaaaacgaaacttacactacgacccatcttggcaccctcctttgtgataaacagcttcccatttcccgtgtaccaaaccatgtactcatggtttggtgacattaagccctggattgggggggaggtcgatgtgctcttccctatgctgccagcgcctgataaatggtctaagtttacgaacccagtttccctctcgtttaccacgcagggaaaagtcgtgcacacccttaagtttcatggcaggacgtgggattggccgatccctcccaaattgccgcatgcatctatccggatgggcagcttcaactgtgtggaaacagataatcggcgttgacaccatccacaacaatcgctcatggtcagatgcaccaatgaaatcatagtccccatatggttcccagacaacctgcacataaaaaaaacagttagcttcctttatgtaatcacatgtaccacaagtgcaaacttacaattaataaacaagcactatacatacgttttcccgagtgagggcatcgaaggttgtcctgtagtacaccacctcatgcaggctaagtcggggtaacccgttaaacctgttaacaaaataactaacattaaacaatgtagggcttaattgtttaaattgttataaaatgaacatgtagtcacacataccggtgtccaaaatgggcttgtgggtccgtaggctgtggaatacatggagcaattggtgggaatctcagccacgcccacgcctgcagtagcatatggcatccaccaatgtcctttctggatgcatctgtacactcgcacatctgtctaaacaaatgtgcaaggaccgcagaggcccaactgtatcctccgatctctgggaaatcccctgccaacaaagggatatagcttgctgccatcacgctacctccagatcgatcgctcagcagccatgcaccaataaggctggcaatgtgcgcctttgcaaaccgcgtcacattgacaaaatctttatccaactaaccccaatccccaaaatgcctatcgaagtaagtcagtcgtaggtatccaccggtcagctctgtttcgttgtcaggttcttgaccgaaaacgtcctcaatcacctccgcccaatcagacaaagtcactccagtgacgacattgtcagccgtgggcaatctcaaaataccagccacatcttgtaacgtgatagtcatctcgccatgtggcatatggaacgtatgggtctctggcctccatcgctcaactagaggactaatcagggcagcatcaatctaagacaatttcattaatcaattgacaactatagttatcgttaaatcaaatttgattactaatatgaggtgttgcatacctgaatatgtcgcatgcgtgcgacatgaagaaagtcagcatcccgcaacatatcagaaacgacttgaggaatgtcgtcatatgctggtccccccgacaccttgccatgtcgagtctttagtagtcgtactttgccctcgttccacacagcttgtgaaacatgggtgcgctgagtacgcctacgcaaagcgccccatctgtacggggtaggaaccacataagatgtcggatccatcggttcagccttatgatccgatacagagcgcggcgaatcagatccagataaatcggccatgttatcagtaacttcatacaccaaaaataaaaatccatgttaacaattatgtacaattcacaaatcattaaaacaacaaatttctaaacactagacccggttcggcctacaaccataaaccctaatcactgcaccccgaaccctgaaccaaaccctaatccatgcaaccaaaaccatgacaccaaccctaaacccaaccctggactaaatgtcacatacctggccaaccaaaccctaaacctaaaccctacaccctacctggccaaccaaaccataaaccctaaaacgcacaccatcgtcatatgaccatcaagaccaaccctaccccaaccctgacccaaacgtcacgtcccatgctcaccaaaccctaaacccttaaccacaattgaacatcacatcatcaaaccctaaacactacctaaccatgcccaacaaacccctaaattttaaattctaatcattttagccaaacactacagtaccaaacacctaaacaattttctatccacctaaatgtatgtcactaacaaattaacatcatcctaacatttttctaataaataaatcttaaaccataaactaaaacaattattaagtaacctaacatctattttgctaaaaaataagtacatgcatcattaacaatataaataactaaataataacaacatcgctaaaaggcagagcagagcacttacttgttcgcaggattttttctgaaaaaattcgcaattcagtagagcttcgctgcacaaaatatccaccaaaaactctagagagaaggcagagcacttctagagagatagtggaaagtgaggaaatggtgggggggctatttatagaattggggtagctgtaacatgcctggattaggcatgttacaacacacccaatctaggcgtgttgtaacatgcctaatccaggcatgttacacagccccatttttgtaaatattttacaaacaacccctttttggtaaatatttaataaaaaaatattattttggttcttttgcccttagcttctcattcaactttttagccaatgatttcaacctataaggttgtaatttgagatacacccaatcatctaccttaaaattaacatctctcatatgtttattagcataaactgtcatctgatcctgtgctttcaacaagtttttccttaactggtccagcaatacatctctatcctgagtaagcctttgcacctcctctactgctgtcggaacagtagttcccttccataattgtggtgggtctataccatacaaagctttaaaaggagtaagcttagcttagcagttatagttggtattaaaccaaaactctgcccaactcaaacaagctggccattactttggtttttctcctgtaatgcacctcaaatatgtttccacacctctattaactacctcagtttgtccatttgtctgagggtgataagctaagctgaatttcaattttgttcctgcacacttgaacaattccttccaaaattggcttagaaaaattttgtctctgtcagaaattatggaatttggaaatccatggagcttcaccacctccttgacaaacacttcagttatatcctttgcagtaaaaggatgacaaagtggaataaaatgagcatattttgtcaatctatccactaccaccagaattgcatttttaccttgagccttaggtaatccttctatgaaatccatagaaatatcagcacatacttgtgtaggaacaggaagaggttgcaacagtccagcaagtgatagtgcctggtacttattttgctggcaaatttcacaagtggctacaaatttcagaatatcctgcctcatgccctcccaataaaccagagcagatatcctcttaaatgttctgaaaaatcctgaatgacctccaactacagagttgtggtattcttgcatcagcttaggcaccttggaggacaatttagaaatcaccagtttccctttataccacaattttctattttgtaatgaatatcctgggagtgcatatccattagccaataattcttgcataattatcttcaatttggggttagctaaaatttcaacttcctattccatcagaaaaattaatcatggaaatggtaggaaaagtcattcttcttcataaaacatcagctgctttgttctcacaccctggcttgtatactatatcaaaatcaaatcccatcagttttgaggtccattaaattgatcctctctcaataatctttgatcagttaaaaatttcagacttttttggtctgtcaatatagtgaatcttcttcccaacaaatagtgcctccatttttgcactgctagcactatagccatcaactccctctcatatacagacttcttttgagctgcttcagacaatgtttgacttaggaaagctagtggtcttccttgttgcatcagaactgcaccaagacctttactggatgcatcagtttccacagtaaaaggttgtgtaaaatctggtatagaaagtataggtatctctgtcagggacctttttagttgctatacagcctccttagcttcttcattccacctaaaactgtctttttttaacaactcatataagggtcttgctattttccatagttcttaacaaatctcctgtaatagcttgttagacccaagaatcccctcaaggacttcacatttttgggaataggccagttcctcatcacttcaagttttttagggtctgcagctactccttccccagacatattatgccccaaatactttactttactttgcctaaagctgcactttttcttattaacaaacagctgattctgaatcaataaagataacaactcttacatgaactacctgatcttcttccttactgttgtaaatgagaatatcataaaaaaaaaaacccaatacaaacttcctcaaataaggtttcaagacttcattcattaaggcctgaaatgtggaaggagcattagcaagcccaaaaggcattactacaaactcataatgcccttcatgagttctaaatgcagtctttgtaatatcctcctctttcattctaatctaatggtatccaaattttaagtccagcttagtgaaaaacattgctctttccaattcatccaacaactcatctataataggtataggaaatttattaggaacagttattttattgagggccctatagtctacacaaaatctccaccctccatcctttttccttactgaaataatgggacttgcaaaggggcttatgctatgtctaatgattccagaattcaacatatctttaatcaatttctcaatttcatttttttgataataaggatacctataaggccttatattaggaatttcaaccccaggtttcaattcaattctatgattatgccttcttgaaggaggaagatcactaggatcctgaaatacctccttaaattcctgcaacacttcttccaaccatgtaggtactgagctggtatcttgaacaacctctagattctggaaaaacaccacaaatccttctcctgctcctctcacttctttaacaatggacttcaatgatgcctcagatcttgctaatgcagcatcccctcttaatacaataaaaccttcagcccttgggattttcaaagtcaattctttgaaattggcctttatctctcccaaggaggctaaccattccatcctcaacaccacatcaactcctttcatctcaaacataaataaatcctgctggatttgtagtccctgtaattgcaaattaaccttcttacaaaccccttcacatcttattttccttccatctcccacctccattgtatgaggcatagtgttagtgataggtagctgcaaaatctttactactacagctaaaaggaaattatgggaagctccacaatccactaatgtcatgactttataatcctgaataataccccacaaccttatggatttttttgaagtgaacccaactatactatataaggacaactgcatactttggaattgggtttccatttcctccacttcttcccctgcctcttcttcttcctccacttcttctcccaatatcaacacctgcaactgcttgttaggacacacatgacctccctcaaattttccatcacaacgataacacaatcctttcgcagctttctcctgaaattcagcatctgttaaccttctaaaaggtctgcctctataagaaccagtagtttttacactattagaatcagaattagaaactgattctcttggtcttatagaagatgctttgcttcctggttcctaacttacagttcttgcataactggaagttttggccatgcttcctttatttactcctccagctcccttctccatcaacattcttttcatctattctctgagcataatccatcaactcaggaagtgaatttacagggtgcagctttaattcagctctcactacattcttcaatccattgaggaaaattcctttcaaatactctggttctgtcccttttaatggtcctgcatacagctcaaatttttctttgtattcctccactgttccctcctgttttaggcttaataataattcatagggactttgattcatttcaggttggaagcgttgaatcacaacttgtttaaattcggtccaattagggtttttagccccaatttcccaccattggtaccaattcaatgctttcccctccatagctaccattgctgcatgaattttgtcctcctcctccactcctctcacctcgaaatagcgttctatcttgttcacccaaccaaacgctccttctccactgaaaatcggaatctccaacttccgccacttgtcctctttctcgctaaaatggaaatcgcgattctgcctcttgccgctgtcacaattaccgcttccttaatcggcacgtgccatgcctcagatcgtccccacaagctcctccaactgagctcgcaattcatcacgttcaacatgcttgttctcatacatatatcttaaccctgcgacctcttcacgcgtctacatcatgccttcgaatccacgctcctagaactctactcttgcatccatggctcctcgcgttgagaccatgaatcagcacaggtccaggttcagaatttatgctctgatagcagtgatagagaaaatctaatggttctctattatttcattcagaatggaaatacaccaaggattagggcctaacctcccaatccagtttccccaatacctccctagtcctcttccttcctacttaactgctatttatatgcagttaactaactccactgcaagtgacagctgtcagttacattttacaattgctttttaaacctcccatgcgttctagccccatacacctactgtatagatggtctaacagaagcatggccatgtgttggtgaatgaagcatgaataaccaactagttaggcttgttatgcctagcttcaactaatataggagaagaacgaaaagagtcatagattttgaggcacacgaagaaagaatcaaaagatagagtgtggtattaaagagaattgaatagtattatcattttcttattccttttcaaaatctcaataagaaaaatgttgagtgtggtatataaagagtccaaggcatgcatgcttggcaaatattaaaagtgatagatagtgaattgtcttatcccatctaaaatgtcatctaatttgatattgatatgaagttatgaaagttatcaaagttctaaaaaactatgtatgtctgacttcatctactatctcaaggtttttgatttctttgcgactataattatggtcacatcgcccataaaagttcacagaatttttgggagatttatgactgtatttctgtttatgaaaagtgatgataataatgatggatatataaatgtacaattgtacataaattccagcttgaaatattagtctgtttatgactagcgggaagcgcattcacacttgacttttattgtcacatccatttttcttcttgttaattatttattgagtaaatagttatttttgtatctgaatgtgtaaagtgctgacaatttgtcttcaaaagatgaaaatgcaaattttagttcttgaaagtgaaaaaagtgcaacaaatctatccatcagttaacttttatccgttactgttaatgaaagaacatatgtggcacattcatggacgaatctgtgtgcatttggttagttgggagaaggagagtgtctctagtgaggtgctggaggctgccaggactgcttgcaagaagtacatgacgaaattcgctggaaaggatgcattccacttgagagtcagggtgcatcccttccatgttcttaggatcaacaaaatgcttttgtgtgccggagccgataggctccagaccatgcgaggtgcgtttggaaagccgctgggtacttatgctagagtggctattggccagttcctcctttctgtccgctgcaaggacagcaacagccatcatgcacaagaggccctccgttgtgctaagtttaagttccccggacgccaaaaaattatagttagcaggaagtggtatgtatctggacatggctactaacttgtccacagtagttcaattcgaattctgaaaagtaacttgtatttattatcgatagatttgcacttttttctttcgtatatggttttaactctaggtattattcttttaaattcttgcttagggggttcaccaagtttggccgtaatgattatttgaagttcaagtcaaagtacaggattatgcctgatggcgtgaatgctaaggtaatgttgagctgcttgacaatgcaatatactgtgactgaaactgtatggcacatagatttcatcatgctgaggacttttttacttgttaacttgcatcttggggaatgcattgaactgtgtttctgaatgaaatttgccttttgtcttcagtttgtaccttttattggttactattagtgtgtgtaattgtccttctaactcgcatgttgttttgtgattttgcagcttcttgggtgccatggacaattggctaaccgccaaccaggaagagcctttttgtctattgctactgcacagtgttagttactcagaaatattattgtttttgtctgcacattattttaaaccaagttgagttaattttctttttttctgaaccactttgaatggataatagtaatcttatatgttgttattgttcacttttattccttctctttaggattttatattggattgttggttaccatttgttcgcatacttaatattgttttattagtagtcgcagaatgttgatttcttattattaactctaaaaatcaatgatgcagattattgctttctccaccttactgctctgctgttcaatctttagaaccattgttttatagctgtgcagtagttataatttcttgtgatcattatcttgtcattatgcggaactgcggaaggatatctgtcatggtgatgacagataattgacattttgaccccaaaactgaatatttcttagagaaactgaatgtgttgtgtttattttctatttccattcttttgcaactgaatgacaatgacatatttccctggttattttgcactgtaatttgtggtttttgtttttctctcaaaaaatcaaaatttgaagttggctctgaaaatgggcctttttcgattgaatctctagaagcactaagctggaactggaaaaggattgcttaattagccactcatagctttgtttgtttccccaggaaattcaagggctttagaggatatctttggaagggttccttattggctatggttgtaaaaggatggttttttaacaatttaagtagtagaaaaaagtaataatgaaaattttaaattttctcaccctgtgggtgtggatgtggtggctagtttgatgtttaattgtaatttcttcagttataaattttgaactgatagggttatatcttgaacatgaaccagtagcaactacataatcaaagagatttgcttaacctgggtttgtgcttgattgaattttgctatagctccactgattgctaactgacttttttgtttacaacttgtaccatgtttcatcataagttaccatcatctcctgcaactaaactatttcaatggtaatttaccccttggatccagattatatatatacctgtctttattttctgcaattggtttgaactttgtgttgcttcaatagaaaataagcatttggaaatcgatggagaatgcttgggtaggtaaacatttatgttgactgtagatctgaagcctcattaatttgtaaatatgtcgatgattgtgtatttgggtttcctagagctctgttatcttctttttttctttttttgatgtatgttaattaacttttcaaagcttaaaagtcattgtcaattgcatatcagagttacagactgaattggttctaccgtttcttaaattttcctgtatatatcatggatattctcagttagcatcaacattttatgctagaaaccaatctcctcatccatgctattgtagagttaagcatcttgaatggtctaattgtagcagcatgtaattgttcctagcctctcaaatgtcctgaatgaatgcataacttgctaaaatgttcatgcataacttgtagttaagtagttaagtgactctgagtactttcttttataacctccttggctccttgcatgtgaatatcttggtgtcaccaactcctagagtgctctttttaacatatgttcatttcataatttcattgcaacaagttgttggtaatggtattcatgataagctttacttatgagactatgttactaaaagtaacaactaatgtctctaacaaggaatttaagaatagaaaggtataaaactattgattttcatcttgatctccatcaactaattaacaaaatctttgaaagtgttcaagtatttgattatgctctgaccattcttatgttctaacttgaccaaccatctcacaaggtggactttgttcttaggcatcatcttttaatatttcatatgcaatggtatacgttagtatatttgatcaaacaagcttcattcaatgaagttaaaattcatatatagcttcactgctccagttaaaatctcctattctttgtcactcttttcttttagcttattctctacactggcttccaacaaaagtatttttttatagtcaatttgaacatatctttaacagaagtgcaatattcttcatcttgaatcatagtgtgataatatcatgttggataatttacgtttctagttgattgatacttttcatttttatttgattaatattttctgtttttatttgattgaccaaatcaaataatatttgatggcttaggcccagtccattgtaaactcaattcatcctataaatagatgagtaagggtggaggcaagacacacggaaatttgagagcctcaagtgacagtcttgagtggcatattttagcgagcttgcatgctctgcatttgagagattcttagagagtttgagtgaaacactctaggtttcgtttaagtgaccaccattgttggagaggttgagtgtaccaccacattggtgtattttttgattcattgtaacccataattgttatagtggattttgattctggactaggtcccatgagtttttcttttctcacattaagaaaggttttctcacgtaaaacatattgatattgattgtttctctcgctccctttggattttattttcgcttccgcaatttgatatttgagggtccaagatacccaacagtggtatcagagctcgggttcaacgggttctgaaggaatcgagatggagaccagcggcataactcacgacggagatatgttcaagttgaccgcagataacttcaacttttggaggtcgatgatggaggatcatcttatctgcaaggatttatatgatcccatagtctttgaggagaaaccgactggcaagtcggacaaggattgggagatcctaagtcggaaggtcgtggccactattaggaaatacattgacaaaagcctttttgagcacgtgtccgagttcacaaatgcgtacgagttgtggaacaagagtccatgattcaaaagaagactcccaggaacaaagcacacctgatccgccagcttgtgaagctaaaatacaaggatgacatgagtatgatcgagcacttcaacacctacaaaggtaatatgaatcaattgtccaaagccaatatgaaaattgatgacgagatgcaggctttgttgttgctgagttcgttaccgaaaagttgggatactttggtggtaactttgagcaactcgattccagaaggaaaattgacgatggatggcgtgacagacaaccccctgaatgaagaatccaggagaagagaacgaggtgtatctagcacgtttgaggctaacgttgctgaaaacagaggaaagactgactctcgggatcgtggcaagagccaggatcgaggtggacgagataggtccagaggctggtcaaggccaaagcatgatttaaagtgcttctactatgggaaggtaggacacaagaagtcagactacaggactctgcagaatgatgaacagaacagctatgtgaagccggatcaaattgttcccagaagaagaagtgatcagagtaccacggcgatggctgccaacccgaatgccgagatattcctcctcggtgaggaaatgttgaacatagcccatgatgactgcacctggattgttgactccggtgcctcgttccacgtcaccccacatgagggattcttctctacctacaggaagggagattatggtgtcgtgaagatgggaaatcagatgaccagcaggattgttggtgttggtgatgtaaccctgaccacagacacaaggtgtcgggttacgctgaaggatgtgaggtatgtacctgacatgcgtttgaatttgatctcggttggaaaactagatgatgttgggttactaaattactttggagaaagtagatggaagctgaccaagggaagcttagttgtggcccgaggaaagaaagaaggctccttgtatgtcatgcaaggaaagaccaatggcagggaagccaattctgtaagggatggaccaagcttggagctgtggcacaagcgcctcggtcatatgagcgagaaaggactccagattttggagaagaaagagctattgaccgggttgaagggtcaagtgttggagagctgcttgcactgcctagcaggaaagcaacaccagatttcgtttgtgagaccggatcaacccaggagacggaggtgtatacttgacatcgtccatactgacttttgcttcatgccgaagagatctcttagaggaacgtgttattttgtctctttcattgatgaccattctcgcaaggtgtgggtttacctgttgaagaccaaggactaggttctccaatcattcaaggaattccatgccatggtggaaagggagactggcaagaagttgaaagtggtcagatctgataatggtggtgagtatcgtggtccctttgaagcttactgtagagaagtcgggatccgacttgagaagacgccccccaagactcctcagctgaatggacttgctgagaggatgaaccagactattgaggagaaggtctgaagtatgctatcgaatgtcggactagcgaaagcatattggggagaggcagtgagaatagcggtggatttgataaatctctcaccatcgagaccactggatggagagattccagaggaggtctgaacaagtcggagagagacctatgatcacctaagggtgtttggatgccgagccttcgtgcatatccctaaggatgaaagggcaaagctggatgcgaagacgaaggagtgcatttacctcggttcgccaaaaaccgagtttggtttcaaactgtgggatccaatcaacaagaaaattgtgaaaagccgagatgtagtcttccatgaggatgagaccatccatgacatctcgaagccccaagtccgggttactgaccgaagagaagaacccatccctcgtgaaagtgctgaagcagggggagaaactagtgaggaaatcactgaaggtgatgttgaagatgatgaccagcaagaagctgataatgtcgggatccgagttaagaatgaagaaccgggttctgaaggggctgagaaacaacaacctagataccccactagagaaagaagatcttctacaaggtttccacttgatgaatacatcgtcattgttgaagacggtgagcctcagagttatgataaggccataatgagctcggaaaaagaagcgtggaagaaggcaatgcaggaagagatgaattccctgcatgaaaaccagacttatgagcagaccgagatgcaaggctactcggatgccaatttggagggagattccgactcgaagaagttgacgactggatatttgatgagatatgctggaggagcaatctcttgacaatcaaaattgtagaagtgtgtagcactttcaacgactgaggccgagtatattgccgcaactgaggcgtgcaaagagtttctgttgatgaagagatttctccaagagctcggccataatcaagataagtatgagttgaagtgtgacagtcagagcgcaattcatcttgtgaggaactcgacgtatcactctcgcaccaagcacattgatgtaaggtatcactggatacgagatgtggtggaggatggaaagctcacacttgggaaggtgcacaccagtcagaattggtctgacatgatgacaaagccggtaccagcaataaaatttgaagattggtatgaaggagctgggctgaggaactcggcatgatgaagccgaggtgagaaggtcgggttgttgaaattgaagacctcggtcgcattgaaaaaacggaagagggagatttgttggataatttccatttttagttgattgatactttccgtttttatttgattaatagtttctgtttttatttgattgaccaaatcaaataatatttgatagcttaggcccagtccattgtaaactcaattcatcctataaatagatgagtaagggtggaggcaagacacacagaaatttgagagcatcaagtgacagtcttgagtggcatatttgagcgagcctgcgtgctctgcatttgagagattcttaaagagtttgagtgaaacactctaggtttcatttgagtgaccactattattagagaggttaagtgtaccaccacattggtgtgttttttgattcattgtaactcatatttgttatagtgaattttgattctggactaggtcccgtgagtttttcttttctcacattgagaaaggttttctcacgtaaaacatattgattgtctctcttgttcccttttgattttatttccgcttccgcaatttgatatttgagggtccaagatacccaacatatgatttgaaccaagcaagtttgataccattgttaattaggaaatgttagatcaatttctcttttcatcatgtggtctataagatgggcaataagaaaatagatcaaaaagaaataacaccaagaatttttaaaaattaaggaaaatctctcaacatgagaaggaaaaattgcagtacctcttaattcaaataaaagcctcaattatgaagtaagattacagtggcttttgcttgtcaatttgattcttctaattatcacaggttttttattagtttctctaaacatcatgaattcccatttaatttttctaaatgttatgcgttcttatttgattcatcattcttaagagacatgtagatagatacttaatagacagcataaatgaaacacaatggaaaagattttttatgagaactaaattgtattttcttaaaaaaaatgggagattaaattgaaaatcaaaatatttaaaaagattaaaattatatttactattctttttaaacaatgtttacacccccacccacctttattatatttattgtttttcacatttcaatttcttaatgcatgattgtattgagtagttgaaactacacttggtggaagcaggttaagtaaactaactaaactgctagttgtgggtggttttgttcgagattttccatggtttgttggtatgattctaatctgatttagacctgctgtaattttaatttttaggtaagtgtgtactggggttggtctaaattcactgattataggagttgtcctaaattcaaccaaacggttgtacacttatgtcttgttgagttcataggaaatttatttaattattaaagtaaagtataacttttgtacggacggctaatattagttgcatagttagcaaaaaaatttagtacatgtttggcatttttaagtgatgctaaattttattttatgtagtatcatattttatttttaattctaattaattatataagtatataattattaaaaaaaatttccgtcatttaataattacaaattttatttttaagtagtatcataactatcattaattccaaagtggctccattgactagtacctatgatcaaataggtactttttttatttttattaaacagattatttttaattataaaaaatggtattcatgctcaagtcaaaacaatcgtataatttataataagaagaaataaaaaaatgtatgataatatgatgaaaaacataaaaagaacttggtgtaaaaaaacttaatcatgtgcattttcaatgtaaaaaaattagtttgtgaattaataagaaattattatttgtatgactttataaataattattataaaaattatactataaaactgttttacacttttagtttttctacaaaaatattatagaaaataaataaagttattctttgtaaaatgttaatgtacatcatattcacatgtatacacaaaaagatttataaaaaattgtgttttacataaagagtttaaataaattcagtgacaaattgagttttgatgtatttttcaaaatgttcatcttcgtacaaaagtaatagccaaaaataactattcaaaaagaaaaagaaaaccttctgattttgacacatgaaaaaaaataatggtaaaaactaacctgtgagcaacctagttatttttatcatttttcatacatcaaaagtatttgtttcttctgtcaatgtgaatattttattatagataatctatgaccgaaaatatatttataaacgcttattgatgagccttgaaatccaaaatattcaaactttttatgataaaaaaaaaaaaaaaaaaaagataaagacatccgttgattgatgtatatagtcaacactaacgtaatttttctgatttttcatcattttcttcattcatattttttccatttcctgttttattaaattttacttttacaacgaaaaatctttcttctttgttaagagttgcacgccatcctctagagtactaaattataatctctgatattaagtattaaggaaagaaggttaagcattaagttattaatccggatgaaaatatggtctcaaaatgggttatatatatttagttatttactaatgacatgttcatttgtgatcattttaaattattttattttctttttttaattaaaacaaaagaaaaattctcaaaaaaaaaaaaaaaacaaaagaacattaaaaaattaatccatatttgaattaatttattttaaaaataaatattattttgaaaaacataaaaaaaaaaacccgtaatttaaaactgaaacaaataacacatgccaactgagtttttcccaaagttacgcaaccaagctcaagattttcaatgaaaaacaaaatcgtgaaaacagatgtgtgagcaacctataatttttatataaatattaaagtatggtatcttgtttttttcctttttatttaatttgggaaaaaggtttatatacctgctttttgtaagcagctgacaaagacttccgttgacatacagccaaaactaatgttagttttttctgttgcttcatcattttcattgatacttttatttctcctttatattaacttttacttttcataagaatatcttttgcatgttcataaccttttacttttgtcctgaataattcgttcgttaattaagtgttccaaaaactagttcaactcagtttagccaacttggtaaatcagtcttacaaaatagatattaattaagtcctctcatatgaaaaaaaagtattatgatcccttaattttcagtaaacattggttcctattattactgtttcttaagcttcaattctgaaaaacttaaattaagttttaatctctatccgtctttgtatagagctaaaacttaagattctttggtttaacaaagtgttttctattttcatttttatcgtgtccatatgtttgtatagaaaattgtggaaattttttttttattgtttttgtttttattttctatttttactcttttttcctgtacaaacatcaacaaacaagaaacaaaataaataaaaaaaaaagaaaaaaaaaacatttttcaaaccaaacaatttatttagcttttttttttttcttcacgcaaagactaattcttagattaatgtcatctttataggaacttagctcaacatacaaaatatttaatgtaaagctagtacaacctaataattaactcaaataacttaatcacaatgtcatatttatgcatgagaaaattgaacttataaacatatttaagtaacatagttatctatcatctgtattgatgatatggctcgcgtttaatattatgaagatctcccttaatctaaaacagaaacaatctagtctaaaaacaaaaaaagtcctgtggtagcacacaacagacacaaagcaaaagaattacaaaagaatactgattttggcgacgtcatatcagaggtggtggtaggttccaatttggcaaatggttgcactcaatatttcaaccgtgtaaacttaacgcgttgaataatcccatacacgtcccattaaaaatgccattgccatcatcatcaaatacccaaacttccaatatctttaatttcatcaaattcactccattaacattaatgccataacataattcattgccatcatcatcatctccatgtcctaattgcttttgctttcaatattcattcattatcactacacaaaaactatcagctcactcaactgtgccttatcatgccctcagattatgataaactagagccacttcatgcaaccccacaaacaaatattaaccggtcacaaaaaatgttaagtccagaaaacaacaccctcaaggtgcatgttgtggaggccatgttgttgctacccttcttcatggttctttgaccaggatttgtgacacaaagtggtggaacaacctatgccaaaatgggacaagaagaaaaaccaagcagatcaagagttcttgtgttgtgtttcatgacatggagggtgtgcaactctcttccaagattggaaaggacagcaacattaatcatccaaggattttcagctatgctgagctctacataggatcaaggggtttctctgaggaggaggttctaggaagtggagggtttggcaaagtgtacaaagctgttatgcctagtgatggaacagcggtggctgtgaagtgttgcttggcagggaaaggtggtcaatttgagaagacttttgctgcagaacttgcagcagtggcacaccttcgccacaagaaccttgtccccttgaggggttggtgtgtttttgaggatcaactctaccttgtgtatgattacatgcctaattcgagccttgatcgtgttctgtttcgaaagaacttgaaggaggagccacttggatggatgaggcgtaggaagattgtgaagggtttggcatgtgcattgcactatttgcatgagcagttggagactcaaatcattcacagggatgtgaagaccagcaatgtgatgcttgattctcattacaatgctaggttgggggactttggcttggcaaggtggcttgagcatgagcttgagtatgagtatgagacaaggaaagaatcaacatcaagaaagtttgagcattttaggctgagtgagacaacaaggattggtggaacaattggttacttgccccctgagagcttccagagaaggagcattgctacctcaaaatctgatgtgttcagctttgggattgttgtgttggaggtggtttgtggaagaagggctattgatctcacataccctgatgagaaaatcatcttgcttgattggatcagaagacttagtgatgaaggaaggcttgttgctgctgtggacacaagggtaatagatggttcctacaaggtttttgaaatggagcatttgattcacataagcctcttgtgcacactccatgaccctcaattgaggccaagcatgaagtggattgtggagacactttctgacatgtcaaacaagttgccaacactcccttcatttcactcccatcctatgtacatctctttgtcctcctcttctgagactagtccaaacagcacaaaaggcactggcacaaggtcaggaacagaaattgctactagcactagcaatcatactagttccaattccaaatttgtcacagccacaggagagactatatatgcaactgctgaagctaaacacaaaaacagtggaactagctcttctaagagtagcaagagagtgatgcatcatcagccatcatttgttgaaacacctagggagataccatacaaggagattgtttcagccacaggtaacttctcagagtccaaaagggtggctgagcttgactttggaactgcataccatggcatccttgatggccactaccatgtcatggtgaaacgccttggcttgaagacatgccctgcattgcgccaaagattctccaatgagctaaggaacttggcaaaacttcgccacagaaatttggttcagcttagagggtggtgcactgagcaaggagagatgcttgtggtgtatgattactcagctagaagatttcttagtcaccaacttcaccatcataacaatggtattataaatggtaattctgtcctcaaatggcatcataggtataacatagtgaaatcacttgcatctgctcttctctatctgcatgaggaatgggatgaacaagtcattcacaggaacataacctcttcagcagtgactcttgaacctgacatgaccccaagactaggtagttttgctctggctgagtttttgtcaaggaatgagcatggacatcatgtaatcaccaccaggagcaagtcggtttgcgggattttcggctacatgtcaccagaatatgtggaatccggagaggcaaccgcggctgctgatgtttatagttttggtgttgtggtgcttgagattgtaagtggacttaaggctgtggattttaggcaacctgaggtgctattggtaaagaaggttcatgaatttgagatgagaaagagaccagttgaggcactagcagatataggactaaatggagagtacaattacaaggaactaatgagattggtaagcttaggagttgcttgcaccagttctaacccaaaattaagaccaagtactagacagatagtaaacattcttgatggcaatgacaaattaatcatgggggagaacatggagagcaaggaagattggagagaaagaaatgcttgctctttgtcattggttaagagaatccaagctctaggaatacaatgaaaagttgcataagaaaatgaaggaacaaaataggaaatattggtttgtaacatagagaaaccttgtttgtaacataaagagttttattttttacattgtatctttgtgctttggctatttttcataggggtggccattggtgtgggtcgatctgatcaacccgaaccaaacagaaggggaaaatctgggatggttgtaacatatatgatgatatgtaacttagagaaagctggtttataacatagagagagttttttttataatttgtgctttgggtatttttaagcttgttactttttagctatgcttgattgtatataacagcgagaaggttaatgcattagtgtatttttctgctaaagcaggacttattctatactttttagtttttatatatacatatttagacatccatatttttcaatgtcaagaacatattgtatacaattttgccataataaaaatttcaagagaagggaggaaaagattctgatttgagcaaattcaaggctataaacattcaacacaatgtaacatcaaacagtcttatatgcagtgtaactctccttgtgtaattatattcatccaaatcaaaccattttttttttatgaaactgaaatgggggatgaatcatgaaagtgaccttcctattcttgaaccaatccatttcttttgtgaggacgtttaacagaagggaagtcaaagcaaataaatggaaagaatgagggaagaaaaatggaacagtattaaaactttctccaagctttgttagcacaatagcacctcccttgatgcatgagactatacacagtgatgaatatattgtctccggttgttaaaaaaaggagggactttttttttcaattttaattagtagcaataagtaataaagaatttaaatttcctcaccttgtggctgtggactgtggtgactagtttggtgtttaattttaatttcttccgctataaattttgaactgataagtgatatggttgtatccggaacctgaacactagcaactgcataatcaaagagatttgctaaactcaggtttgtgcttgattggattttggtatatgctttccttctgagactatgttactaagagtaacgactaacgtgacccaattaagaatagaagaagggtatgaagctattgattttcaactcgatctcctaattatcaagacctttgaaagtgttcaagtatatgatcatcctatgaccatttttatattctaacttgaccagtcatttcacacggtggatttgttcataggcatcatcttttaaatcatgaattcgagtattgtccatgattcttatacaatgttataggttaatatatgtgctcaaacaagcttcattcaatgaagttcaaaatcatacatagtcattgctcttcagttaggagctcttattctttgtcaattttccctttttgctttattctttcttgtttgtaatttgtttgtgcaaatctttgcaataaaattgattctctatcatcagcttccaacaaaagtaattttcttaagtgaatttgaacatatcttaaacacaagtgacaatatattctttgtcttgaatcatagtgtgataatatcttttttttttattattattcataagaattgaattcaggtaccaaagagttctctttatatgtggtttaccatgagcaataagaaagaaataacaccaagaatttttaatatgaaatatccctcaacttgagaaggaaaaattgcagtacctcctaattcaaataaaagcctcaactaagaagtaagattacagtgacttctgcttgttaatttgattcctctaactatcacaagtttttcatttgtttctctagatataattgattcccatttaaattagtagagttttctgctaaagctggacttgctctataatctatactttttatacatagatattcggcacatccataattctcagcatgaagaacagattgtatacatttttgccataacaatttcaagagaatgaaggaaaagattctttctgatttgagcaaattcaaggttatacacttatacacgttcagcacaatgtaacatctgtctttctatgcagtgtaactcttcctatgtgatgttaagtatattcattcaaatcaatcccaactcttttgatgaattcttgaaccaatccatttcttctgtgagtaagattgacagaaaagaatgaggaaacgaaagcgaaactgttttaaaactttcttcaagcttttttagcacctcctctgatgcatgatgacattatacacagtgatcaatataacattttcaagatcaagtagaaatgcacaatattgagattctgctgaatacgtaattagatgatggagattctaatagagttatcagatgcatgtaacttttgatgaattttttaaggaattgtcaccttagtaaaataaacttttccgcaaatttacacttggaggaccaataaacgtgcactttcagaaaaccaatgcaacaagagtctacaaatttaaggaccaaaactgtacattaactcacactaaatgcattaaattgtatgcacctgccggcatccacatcacagtaattagaaattataaagagagaaaaaagagagttacatacattaagcaaccaaccaactaaacacaagtcgacagtttaaacacgaagaaatcatatataacctccctcttcttccacattctatcaatttaccaaatgataaaaaaaaaaaaaaaaaaaaaaaaaaaaaaatctatcaatttaccaacatcatacgtgcttacaattaagcttcacaaaatccttgaataccataaatttgcaaagcatttgctatctaatagtaattctgatcaaacacaaattcttcaaattttcgtgcaatactctttgtgttcaactattatcttaccccagagatatgatagaaaatatgatataaaatataataatttttggttttcaaggaaataaagcataacttgaattatctaggatcattttggtctttaatttaaaaacgtagaaaaaattattaatatgatagaaaatataataattttttaagtaaaatattttacaccacaataaaattatatattttaaagaaaaaaacataatataaattgactttgtttttactggtcaatcaaactcttacacgaactcatgcgcattgctaaaaaaaaaaacgaagtaaaaaaatactcattttcttgtaaattaacttcagaaaacattttctttcgaaacatttataaaataagccgaaatttggaataaaaaaatactcattattcaacattttctaaagaaaataaaaaaggcaagatgaaatcacagtaacatgaattgtattgtcatataataatcattaatcacaacttctttctgttgttttcttcatttatcccaatcccatcgtctctgatagtttaggtccctcttcaatcttcgtctcatttcacgtccctccatctttttgtttcttttacaattctcgttgtagaacttacgttagctgaaaatgaacagatcaacaaaaacaaagcaccctagtaaccttagtttttttaaccacatgcacccaacacctgtttcaaaattaaaatataaataaattattatcttgaaacaaaaataataggtgagacccattttttaagctatatagttaagcaataagatatatttttaagttaattaattgacaagttttggtgaaataattaatttataattagaattagaatcacggattcatgcatatatatgtggtgccccttgttctctagatgtcgattcatccatcttggggatagtttgatagctgtttccatagatctctatacagtaataaaacaacatttttctgcctacgtgtccagttgtggtgcattttcagctttggaatccaagctggcaggctcacaagaaaagttagcttgggatgctacatggcagctgtgcatttggtctcattttctcggccattccaagcctctgttgggacatgcaatccactgactagctttgatcacacactcttcatcattcaaatgagacgaaatgcagaggtgttcactggtttgcagatgtcttcagtggtttgcagaggcttttatttacgttacctactgttttgtggttcaacaaagctagatgttaactctgttacggtatctcacacagagcttctctttcccacgcctcttcatcattttcgtgagcattttcgtcttccatctcctctgtttgttttcttggttgttttgcttttgcatgtataaaccaatgccaaattctgcttgtctcattcttcattgtcatcgtttttgtgttggtgttgatacaaggtattcatccccgtcccaaaattgatatgtatatggtctgtttattcatttatatggtggatatgctttgtctctttcttttcttggttcttatccttttgcatgtatgttcgatttatgtctgtttcttttttgggttcttatcctcttgcattagttgttccagcagtttttgttgatatggtacttcacacacagcttctgtttcccacgcctctgcatcattttagtgagcattttcctctttgatcttctctctttgtttttatggttcttttgcttttgcatgtataaaccgatgccaaattttgtttgtctccttcttcactcacatcgtttttgtgttggttttgatacaaggtattcatcaccgtcccaatattgatatgtatatggtctgtttattcgtttatatagtggatatactttgtctctttcttttgttggttcttatccttttgcatgtgtgtttgatatatctttttgggttcttatgcttttgcattagttgttccagcagtttttgttgatattcatgttttttgtgttgtgttataggctaacataaatagattgatccagtgagatttggcataagctcaatggcgggtggtaatcaacaaatcctacttatttatttaaactgtatttgtctgatttattttggctgattatataagattacatttatgagtagtaaccacatcatgttgtttgttcaacaatagtgttgcgtaggctgaatttgatatctgaaatcaatgataaaaaggaaacatggaaaattgttgtgcaggttataaacttgtggactattcccagatcaagtaggcatactgttgagcttatattaatggacaaggaggtatggttatttacaaatgagaaagcattttgtgactatgtgctgctgttagtttatgatgtcaggcaagttattaaactatgacctgaaatgttccttcgtcagggtggtaaaatactggctcagatgaaaaatgttgatatggaaatggtgaaggacacctttgagattgggcaaatttatgttatccaaaactttgaagtcgaaaagaatagtggtcactacaaggcaaccaaccatgcgttcaaaattaacctgcttaaagccactaaaattacaccatatgacctgcctgaaatgcctcttgccaaatactcattcacaaagtttgattcgattctggatggctctgccacaccagactatttaataggtacatagggttgtaattgtttaattatcttctttcctgtattttttttttgtgcaggtgcttaattatgctttatggttgaagatgttattggtgagttaattgaaattggtcattggaacctcgatgggaagccaaagaaagtctcttttactatgaaggatgaatggtatttttgactgcctcgaccagttttttaaaagataccacacctgtttttatatctgatttgtgattttttgtgtggttattatgtttcagtgggactgatataaattgtaccttgtgggaggaacatgctatcaaacttaaggactgtcttgataaacataagactggacctgtggtattggtgatcactatggcaaaaatcaaagaagctagaggtttgttgcctatggcaaatatttgtttcccttgactaaatcacaaccctcctataacacattatttcaataggttatacgaaccatttattgcagttaatttttctagcagttagctgttctttctgtggcaaacctgttggggtgaaagtgaaattatttgtggttttcatgatgacagttctattggtagcatttttcaataatgaattgtttatttaatctttgatgtttgttttactttagacccagcttttccttattagttcttccaaaaaatatatatttctagctgattatgctgtaatcaacaacctgttatgtttaatatcagatgctgtggatgatgatagtttgatcaattttggcatatttgttggctactggctgttgcttgaacaaatgattgtcgaatgctaaggtctgaaaatggatcttacttaaagtgatgaacaatgagaaaactggtcatagggttggttggtaattatcatcattcaagggttttctaataatttggatcgtttggtacctgacataaaatggcccagatctaatagtgacaaatgagccaggacagtcttaaagtagtcactggccattagctgttggttcacagataattatagaatctacagtataataactgggaaacagatagtggattaactttgttgtttgaatacaggtccttatcctatttcaatccaaaattcgatgtatggctctcagatatttgtaaatagcagtatgaaggaaatcattgatttcaaggatcgattgatgaccttgtaattatccaatgtctcatgttatttactgtttactacaataatgttatagtttgagttatgtttaatttaattatacaggatggatccaacccagtcaacactgggttcctatacacaaacctctagccagatttcgggttcttctcagtattcaaatggagatcgtttcctgcacaatgcaaaaatccataatttatttgagattgccgaactaaaaaaggtgcatttttaaccttatgattttctttatttatattttttctcgagctacattcaacctttgtcgtcacctctattaagtttacaacaggaatgtatggttgtcactgtgggtaccatccagaagttgcttatagcaaatggctggtttatgatgcatgtcccaaatgtaacaaaaaggttgattcattggagttgcctgttatttgtggtgggtgtggtaatcaaagtgcagccactatgccgaggtaggctcagttagagattatttatgtacagaactcattttctctaactgaaaattctctaatttgggaatttgtaccataggtatcgtattgatgttcgtgtcactcaacaatctgaatctgccattttcaccttgtgggatcggattcatattcgttaattaaagagatgcagatgagataataaagaagattattgctgaggttattgatgatctaaattttatatcacaataatatatgttgtcaatatgataactgatttggtggactgctgtgtaatgtaaattacatttttgttatcgtaggaaggagagtttgatgcaagagatgtgccagaggctctggatcgtatgctaggaaaaacattggcctttaggttcaaatttgtgcctggtaataaacgtcattctgtgtcactaatatccgaagatgaaatggtagtcagcagtgtaatgtcacgactttctacaattcaggtaaatgtttgtttatttatgttacaacttttgtatatgggttgtgaacagtattataaatgttcagtttgttacttactatatgatttctttgtattatgttcaagtatgaagctgatctatccatatctttgctgcagcaaaccaatgaggttgttcataatgtcaactgttggttcttgtggtgtttgtattttcaaactaaatttcaggatgccaatgattaatcaatatttattgtattttcgtgcagcataccttctcagccagtggtgattctgatggaaacctgaatgagtgcatgacaccggcaaagcgcaatttgctgccatctgattctgaattggatatcactgcttttgaagatttgtcacaaattgaaatgtcttctactaaagtggccaaacatatcaagactgagtgacaaattcttgaattggcgttgcattttgtgccatttgatgacagttatgtctttttttgcattaatcaagtagacattgtattgggattaatgaagtatgcaatgtagctattacagacatgtgacatatttgtgtgcttagtaacagatatttataaagaaatgttatctatattaatttgtagtttttagattgtggttgagtaacatcatctgttctaatttactgcagctatcatatatgtttagccttggaaaatgtccttaatcaatttattgttaccttcttctgctcaacaattcctgcaagaattcagctttgttgccattgaaaatatactcttatttttaatcctacttctgctgtcaatatacttggtgtaaatatctggggaacttggaccagttattataggagagaaaaacattgtttaccatatccttaagcaattctatttttaccttctgacctgacaagcatataaatgtgcttatttttcatactgctgccacccactggctattttgactatcatgtttcatgtcgtctgattgaagttaaactcacaatagtttgatgcatgccatatatattttcagaggaattaaaaataggactgtctcttaattgcttgcaagtcaaaatatcgagtcatgcatgttgcagaggagtgtatttttaatcctacttctgttgtcaatatacttgatattgggtatggcctgagcctaataaaatggtcaaatatcaagtccaagctgcatcagattcaaaaatcagcaatttatcaatacaccaaaagcctcttcatatcttataggtgttgaatcattcatattaatcaatagttcatgaatatatttttatagttttgctgaagaccaaaatttagacagcttaacacattaaacttagagatcataaaaacagaaccccaagataattatctatatcctgaaggagtaacttataccatgtttactatattttgatcaactgatgcaacctatttgattgaaaatataatgtatattgtatactgctcttataatgtaggctatttaaaagaaaataatgcttacattttccaagtataatgtatactattgccaagttcttctatctaagtagtcaaactcagagcattgaagtttactctgcattgtagtttctgaatctcaacaagtggaccattatttcaaagtctagcatttgttctatttaggtgtatgaccttgtgtttcaataacagaggaaggagttgtttaagtagttaaggacaattagttactaacttgcaataaagaacccagtcaaaatctgatcacgtcaaagataatgtgaaccaagcaaaatagtaattaataaaaaattaatgtataactaactgattgcagtcagttcttttgctgcataaatccaccaaataattaaaggtgttaaagtgtttttcgtatttatctctgcgggtgtgaagaatgcatgattcctttggtcaggatatcacatttctggttcaatgaacagtactattgcaaaggatatgaaaaaatgtttcagaatattttttgggaggttgttaagagtgatggatgtcaggcaatattccgatttgtgcatgtttcgctcagcaccaaggatgcaatcataggataagtgaagttaattaatttaaattacttttttactatatcataatgtaaattattttagctccatttttttaatgatagaaattacaattatcatttactgtaaaaagaattaaaatataattatatatcaaacaatctacaacatttgttttttattagatattaatttgttttaaacttttatcatatcaaataatggataaataacaataaaattatgtggtgacattttaagcacagataaatttgttaatagttttgtaatttaaatttaatcaagattctggttttttaaaactgtttctatttaatttgcgtattatggttatctacatagtaatatttaatttatatatttattgaaaaatgattgtttgatttctttgttataggataatcaaatataattagttaagattactttattagtaattttgtataaatcatgatttaatatcagttattcattatatgctaatttgtcacttaaataaaatctcaagcattggatggttgatacaaatctgatgttattaacctgttacgccagtaccatacaagttaaagcatactggttgcttataaaattcagagtaacttgagaggtttaaatcagtgattgcttataaaattgaaaacaaattaaaattaattaaactatatttgagatacaggttacagtgcattacaaaacttcaatttattggctgaaatatgaaggtgtatgcaagttatcgttaaatgtgtaaagatatcactgataagaaaaccagcaaggtaattatgatgatagcagaattgtgcactctgtaaacctgtggccaatcatgatacgtaacccataacccctaaaatttgttgatgattgacaagcaagtactgctgacttctagttggttgctgctatgtgatttcatttgttttgattggttatttaaagtagataaatgccatgactttgtactgtccacttatttggttcagcaggaaattggtcaatagattagaaaaagtacacgagtgccattttgttattataatattatgtgaacccaaattaaacaaaaatactcagaatcaatcattgccaatttttgctctgaaaattaggatttcaataccactgtccaatacctcccattccttgagtattacatcaaatgcaaggctcatagaagataagcaactttccatgctaagttaagcacactaatatccagattaatggttctgttggaactgtttataattttattgtgaaagttgatcatggaagaagacagttgtaatgcaaagatttatgctaaacaagcaagattaaaacggaggctcatattaagagaaaggagtttcagaaaatatggtcataacagtggtcaaagcaaccacagtgcagatggattacaggcacaaaacaatggaatgtccattaaaagattcaaagttgttaatagcatgctattagcaagtgcttctgaaaccacagaaaaccagttcagggctattaacattgaccatgaacaaagaaatgagtcccattatcagccacattcaatctgtgaagagacggttaaatatacagattaggttttgcatgatacaaatgtaaccattaacagagtggggactcaaagtgcaggtaactataatggtcatagtgcctattagattctgtaacaaatttgaataataggctacctgtactcactggttatgtgtaatttaaaaggtgtggcattatagtttgattgtaatattggtaaattgtatttgaaatggaacaaagttagcaagatattctcaaaccagtaaacagtggccatgcattatgttaagatatacgattaagtgttttttcattgatactgttatgatgtcaaacttaaggtgtgtcctaaagattttacctaaaaattatatgttgaagctgcaaggttacgtcgaaggaacataatgcgaggaaagcgtttattaaaagttaatgaaacaatttctgcaatgccgaacaatagcaacaaaaataaaggtattgaatttttccattgataaaaacattctattatttctgtgacaagtgttgaggtaaaaccctaactgtttgacctgaataatacataatttttacattcagcaggaacattatgcatagaacggatggataaggtaacaaatggaaatatgaataatactccgccacaatccaatgattttctgaacaggagaaagatatatttcaggcagcatacagcagtgaggcgcaatttacttgatgaatttgttgttgcctcttcaataaaccaaacggagcaaactgttcaaaatgataacagcgctcaaactgaagatacagttggaggtaacagtaatggtaacattagtacttattcatgacattaacatgtttcacttttggtgtttaattgagggttttctttgtaagatggtttagacgaatgtgattaacgataatgagatgttggctttgtacgcagatttcatttatactcaattcacaggttccttcatgtgtattatgcagatagtaatcaggatgtacctggtccatccacggaagatgcagtttcagatagtagtgatgattattctgaccatattgggacaggtctagatgtgtatgactaattaaaatgtttgcattacatttgtgtactgtgttttgattattatttgatttgtaggatatgttgatttgggagatcctgctcaaatgtgttcctactgtgaagctgctatgtggagtgcagaaagtaccaataagagcaaagatctgagtaaagccagatataatctatgttgtcggggtggaaggatacaacttccttttcttaaaaatcctccaaggctactgcaagatctattatgtgataacgattcaagagaaagtctaaattaccaagacaatatcagatcttataacatgatgtttgctgtcagctcttctggggccaatatagatagatctttattaaatggaaaaggcccaccaatatataagattcatgaacaatcatgccatctaattggtagcctactacccatgcctgggaaacctccaaagtttgttcagctatatatatatgacactgaaaatgaaattcaaaacagaattggggcagcaaggttagctctattttgtcaatgttaattatgtgtggtgtgttacacatttaatcgaaatccaaacatgacatctggatgtgtattctgttttttagatgggaaaaacggcttgattcacagcttgtagcaaaattgaaggacatgcttgatacgcacaatgtgtttgctaaatctttcagaatggcaaaagataggtataacagttgtcaaacacagaatataaacttgcaattaatttcagatagaaaaaaggatgggagaatatacaatttgccaacaatttcggaagttgctgcagtcattgttggagacgcaactgaacctataaacagggatattattcttgaaaaacaaagtggtcgactgcaaagaatcaatgagcttcatccaagttatcttggattgcaatatccattgctatttccttatggtgaagatggctaccgcaatgatatcaagcacagagatatgcaaggctcaaatcagagaacgagaaacaaagtgactatcaaagacctattatgctttaggctacagtctagaaaacatgaaggtcaaacattattgaggtccagaagattgtttcagcaatttattgttgatggttacactatgatcgaatcagagagattgatgtttataaggactcatcaaaagcaattgcgttgtgataaatatagtacattgattgcttctcaaacctcagaacagcggcattcaaattatgggaagcgtattgttctgccttcatcctttgttggtagccgtaggtatatggatcaattgtactttgatggcatggccatatgtagccaagttgggtttctgttgatttgtaggtgtgtctaagagcaagctcatctctttggtaccttgatagtggatgctcaagacacatgacgggtgacaagtctctgatcaagaatctcacatttaaagaaggaggttttgtcacttatggagataacaacaaaggaaggattatgggtgaaggaagcattggtgacaacttaaacaccaaaatcagcaatgtactttatgtggaagggctgaaacataatttgcttagcattagtcaactatgtgacaaaggctacaagatttccttcaatcaagattgttgtttgatttgtgatagtaagagtgataaggtaattcatataggtaagaggaaaggtaatgtgtatctattttctattgaccatgctttgtttcacaaaactacatgtttattaagtaaattggatgaaacatggctgtggcataggagagctagtcatataaatatgcatcatatgaataagctaattaagaaggacttagttattggattgcctaaactcaaatttgagaaagacaaactgtgtgatgcatgtcaaaaggggaaacaaacaaaaatctcttttcaaagtaaaaacattgtttccacctctagacctcttgagcttttacacatggatttgtttggtccttcaagaactatgagtttaggaggcaattactatggacttgtcattgttgatgatttctcaagtttcacatggactttgtttttgaaatccaagagtgatgcttttcaatcttttcgaaaactagccaaagttattcaaaatgaaaaaggatgtaaaattgtttcaattagaagtgatcatggtggagaattccaaaatgaagattttgaaaaattctgtgatgaatatgaaataaaccacaacttttcagctccaagaacacctcaacaaaatggtgttgtggagaggaaaaacaaatcacttgaagaaggtgctaggacacttctaaatgaaacaaatttaccaaaatatttttgggctgatgctgtcaacacagtttgttacaccttaaacagacttcttataaggcctattttgaagaaaactccttatgagctgtacaaaggaagaaagcccaatgtttctcacttaagaacctttggctgtaaatgctttgttttaaacaatggaaaggaatcacttggaaagtttgatgcaaaagctgatgaggctatatttcttggatattcattacaaagcaaggcatatagagtttttaataaaagaaccatgtgcattgaggaatcagttcatgtaatatgtgatgaatctaatccctcaaaagaggaaaaagcttatgatgatgatgtaggaatttcatatcagattactcaattagagaaggtatccataaatgagaaaaatgaatcaagtactgaagaaggttcatcagcatcaaaacaattgcctaaaaagtggagaaccacaaaggatctttcactagacaacattattggtgaagtatcaaagggagtctctactggatcctcaactagaaatttgtgttgtgacatggcttttgtttctcaaattgaaccaaaagatatcaatcatgctttgcaagatgaacattagatgcatgccatgcatgaagaattaaatcagtttaaaagaaatgaagtgtgggaacttgtccctaaacctccatccattaagcctattggtactaaatgggtttttagaaacaagctggatgaaagtggaattatagtcagaaacaaagctagattggttgcaaaaggttacaaccaagaggaaggtattgactatgaggaaacttttgctccagttgcaaggctagaagctattaggctactgcttgcttatgcatgtatcatgggttttaagctttttcaaatggatgtgaagagtgcttttttaaatggctatattgaggaggatatttatgttgaacaacctcctggattttctgattttcagcatccaaatcatgttttcaaacttaagaaagccctttatggtctgaaacaagcacctagatcatggtatgaaagattgagtaagtttctacttgatcaatcttttataaggggcaatgttgacaaaaccttgtttataaagaagcaaaagaatgatattttgttggttcaaatatatgttgatgatattatttttggttcaactaatccaaagctttgcaaagatttttctgcagcaatgcaacaagaatttgagatgtttatgatgggagagctgacattctccttaagattacaagtcaagcaattgaagaatggaatctttcttagtcaatccaagtattgccttgaagtaatcaagaagtttgaaatggacaaatgcaaagatgcagcaacaccaatggctacttcaacttatcttgattcggatgaaaaaggaaagaaagtagatgaatccaagtatagaggaatgattggttcattgctttatcttacagctagcagaccagatataatgttaagtgtttgcttgtgtgcaagatttcaagctaatccaaaggagtctcatctttcagctgtaaaaaggatcatcaagtatctcaaggcaacacccaaagtggggctttggtatcctaaagatgcatcaatcaatatcattggctattctgattcagattttgcaggatgtaagcttgataggaaaagcactagtggaacttgtcatctccttggaagttcacttatttcttggcattgcaagaagcaagcttgtgtagctttatcaactgcaaaagctgagtatatttcagcgggtagttgctgtgcataaagtatttggctcaagcaacaattacaagactatggagtagagttaaaggagatcccactactatgtgacaacacaagtgccattaatatttcaaagaatcctgtgatgcattcaagaaccaagcacatagagattagacatcactttataagagatcatgtgcaaaaaggtaacattaaggtagaatttattgatacacatcatcaacttgctgacatatttactaaacctctgtctaaggatagattttacactcttagaaatatgctaggaatccttgatgaacataacatatgctagcatgagtatgatatggtttatgtgcaactttaaatgcttacttgcctttatcattcatagtactaatataaaaagttgtattatcatcaaaatactctgattcaatactctaaaagctgtagtgttagtgttatactttgtatccaaaactagcaagttgtgcaaaatgataaaaaaaattctattttctgcttctcgtgctgtaataatcgattaacagtcgggataatcgattatcttcattaaaacccaagttttgttcgaaaattaagccattgtaatcgattacccaagttttgtaatcaattacgcttcacaaagcttaaaatgtgccactctggagtaattgattacctattgggataattgattacgacattgttaattcaactttgaaaaactaagtcgtgctggaataatcgattatcacataagctaatcgattaaattgttcatactcaaggtttaaaatcattaatggtcaaataatcgattacattagcattataatcgattacatatcatcttcaacctctggccatatgtttagtaatctaagcatagtataaaataatcgattacatttggatataatcgattattaggacggttatctgaaggtttaaacgtatttatctgccgtcaaaactgaccactcagtgtctatgcaacttccaatgccttaactcgttttcaacagttacatcttctgagatgttgactactgaactgcctattatcccttataaatagctattgccagccttaggaatatctgcaccaagcctccctttatctcttagtctgagccttcttattcaaaccactatggttaaaccttggaagcctggagaattatcttctcaggaccttaaggctgagaccatgctagagcttcaaaaggatatcaaggctagattgtatggagccttgaaagccattagagagagattgaatattattaaagaaaaatataaaagggcacagcatcagcaaatattctagaattcattagattttgtctgatttgctttctagaattaggattcacttgatttggattttgctagatccgctctctatgtaataaatctagatttagtgtttgtctgatctgctttctatctgtaattctcagtttacatcaataaaaatcctgttttgtgtgtactctgtttttctgttttttaattcagcatttaaatgtactcctcagcttctatgaatgaaatttatgctttctgttcatcaattatccgctgtgcattcaatttttgactttaaaaagccaaatagggggagaaaaattgaaaatcaaacgaaaacgcaagtgctctgcatcatactctgttcacctctgtttttcgtgctattttttaatcaaaatttcagtggcatagattgagaaatttagggggagttaagacttgaaaatgcttgttaaggatacatatataataagaatgaataatgatcaaagcttagatatctttaacatttgttcttggaaagaattttttatttttcaggtgataagcacaagtacaaaaatactggaagctttctcattcaatcacaaagacccattgtttttcaattggaaatttggcatgtttaaagccaaaaagggggagattgttgatttgagggggagctgaatgaagatcaagtgagatcaaccaaggttcaagacttggaagttttggctttcaacatggttcaagcattgaagatgttgtttgtgatttaatgtaaaaggattgaaagcatcatgatgatccaagccttgatagcattcacgtatcatttaagcattgcatcatagagaagttaagtaattagtttaaaacttaagaaaaagctaagaaaacagcatatagtcgtaataatcgattactggcttattctaatcaattattttgttcttaagactcctggaaaactaaacatgaacactttaatcgattaccttaacggattaatcgattacacacatctcaacatacttggaaattggccttgtgactgctttaatcgattaccatgatgttgtaatcgattatatgcttacttggaaaactcagtcactctgccttaatcgattaccaatggatgtaatcgattattcttcacaaacatgattatagcataggactgccttaatcgattaccaatagatgtaatcaattatccttcataaacacgattttagcataggtctggtttaatcgattacaattgaatgtaatcgatcacacttcacattcagaatttttgcccagactggtttgatcgattgcgcatcgggttaatcgattatttcacccgttagttgaaatcctgatcctgcattaatcattttaatcgattacaggagcgtggggagcgcatttaatcgattaaattcgttacgatttcaactataaataagaccctttgcctcttgagcgaatagaactaagagagattataactgaagtaattttttgcgaattctgagtatttcctaaaggcttctaagggttcactaaagcttcatctgggctcttgagtcttgcttccattgatacattaatggatcactaaggttgttagtgaagcaagcttgttttgttacaaaggcttaggaaaggtttctgcatcattagtttacattcaacctgaagtttttcattcatatgcatttcaatcttggataatcaggtgaattctttcctagctctttgtgggtattttgttttctgcagtaactttgtaatttgttgattatgttgtaagtgggttttcttgcaagggagatagggtttctccatgttcaactgagtaggtttctcagtgtgggtttggcttctaaggatctaatagagttttagatctctgaacttcttctagggttgaagaagagaagcttgtaagtacttgtaagaaaaatatttacaatagtggaactctactctagtgttgagtagaagaaattggatgtagcctcatagtgtttgaggtgaaccagtataattcttgcatcttgatttaatttctgcagactttattggttctagttaaactctgtttttgtgtgtttaaatttgaagcataacaagtcttggattgatcttggataaagatattcatttggttttatgataaagatccaaagggcatttttaactctgattttaaacaaagaaatttcaatttcctatgattaaccaattcacccccccctcttggttaagtgtgagtgttccttattttccacagttttctgatctgttcttgacattgacatgtaatccttattggcctaagattcaaagggttgtatcaccaatgaaactaactgcggctgatcgccagatattgtgagcagggtttttaaacttaagcttgatcaattgatggttgacttgaaacataacaaagtcttaggcaatgttgtggcatgtaagacatttagaaagctttgcacatgttaaatgtattgtagatttatatgttctatgctgttaaaactaatagtagtttgtctgcagatatttacactattgaattccaaaagcgaggattgtcacatgctcacatattgcttttcttgcatccttccagcaagtatctgtctccttcagatattgacacaatcatctcagctaaaattccagatccggctgctcaaccagaactttatgaatatgtaaaaaatcacatgatgcaaggtccatgtaggcatgctaacacaaaatctccctgcatgaaggatggaaggtgttctagattttttccaaaaaaaatggcaaactgataccgttgttgacctagataggtatcctatatattgaaggcgtaatgatgggagatatattgaaaaaagtcatgtgccactaggcaacagatacgtagtgccatacaatgcaatgttgttgttaaaatatcaggctcatctcaatgtagaatggtgcaatcaatcaacatctatcaagtatctcttcaaatacatcaataaaggctatgatcgtataacagctgctctggttcctgtgcaaaatgagttgggatcaatagagcaatgtgttgatgaggtcaaacactatgtagatggtagatatatttctccatgtgaagcagtgtggagaatattctcatttcatatacataaaagatcctctgctgttgaatgactatactttcacttaccaggtgagaattcagtaatttttgaagatgatgatgacatggatacattgctctcaaagccgaccgttaaagactccatgtttacatcttggttacatgctaatagcatttatagtgaagccaagaatttgacttatattgaattcgttaaatgttttacacatgttgctaaggacagacgttggcagcctaggaagaaaggatacacaattgggaggcttaactgggttcctccaagtactggagaactgtattatcttagaatgatgttgggagtggtgaaaggaccaaccagttatgaacaaattcgtactatagatggtcagctctacccttcctttagagaagcatgttttgcaatgggattcttgcatgatgacaaggaatacattgaggctttgagagaagcatacctttggggttctggccacttcttaagaaggttgtttgttacaatgcttttatcaaatagcattgatagaccacaccatgtctggaatgaaacattttgttatttaattgatggcatcatacatgaccaaaggaggattacaaagataccgggtataaattagtgttttgtcagttttcatatgaatttctttttctgttgcataatcataagttgtattttttattcctagatttgcagcttccaatagaagacttacaaaacttggcactgctagagattgaacaaatactgcagtccaacagaaaatcattgaaggattttcctaccatgccttttccaaatggtgtttcgaacacctattatggaaatagatacatatacgccgaacagtcatatgacaaggagcaattgcgttctgattttgaaaattatgtttgcactctaacaggttatatatcaacatcctaattaattaggatgatagctgactgccgttgtgcaatacatcttgtattcaacattgttttttgtttaattccatttcagatgagcagagaagtatatttgataccatcacgagtgcagtgactaggcagcaaggtgaaactttcttcctctatggccatggaggtaccagaaaaactttcatgtggaaaactttggcctctgcattgcattccaaaggagaaattgtattaacggttgcttcaagtggtatagcttcattgttgttgcctaatggcagaactgcacattccaagttctctatccctgttcctacactacagcactcaacttgtaatatcaatcaaggtagtgaattggttggtctgttacaggcaacgcgtttaataatatgggatgagacaccaatggcacataaattctgttttgaagcactggacaaaaccttgaaggacataatgtgtacatctcctgaaggaactttgccatttggtggaaaagttgttgtttttggaggtgacttttctccaaattctagcagtaatacctagaggcagcagatcagatattgtttttgctaccattaatgcttcgtacctatgggaatactgcactgtgttaaagctgaccaaaaacatgcgcttgcatcttaattcggattcaacaaatgcacaggaaattagtcagttttctgagtggcttttagctattggtgatggaattctaggcacgggtagtgatggattttatgacatagaaattccatctgatttacttattacagatttcactgatgcaattgattcaattgtcacacatacatatcctgatctccagcaaaaatatcaagatgaatcatttctgagtagcagggctattctagcttcaacaattgagattgtcgacagaataaatgatcatgttctaagcattataccaggtgatgaaaaagaatatctaagctctgattccattgacatgacagatgttgcggaaagtcagccttaccaatcagttacacctgaatttctacactcattaaaagcatctggaattcctaatcatgcaatcagattaaaaataggcactcctattatgttgcttaggaatctagatcaggcggaagggttatgcaatggtacacggcttattgtctcaaggatggctaatcatgttattgaaggccacattatctttggtaaaaacattggaaatatggtgtacattccacggatgtcattatcactatcagaatctccttggcctttcaagctaatcagaagacaattctcaattatagtttcgtatgctacgacaataaataagtcgcaagggcaatctctagatacggttggcttatatctaccgaatcctatttttagccatgggcagctgtacgttgcattttcaagagtcacgagtaaagctggtttaaaagtacttattcatgacaaacaagggaagcaacagaatgttactacaaatgtagtttttaaataggttttccaaaatttgtagtatgtaagaacttggtaccaatgtctatgaaaacattataatagttacctgttatacttttggtcttgacattgctgtaaactctgtgatattgcattataactgtccattgctgtaaactctgtgatactgcattttggatatgcattcatacaaattagtcttaacatttgttctttggtagttgattgttttgtggtgttagtattccacttccccaattttgaacatggttgcttatagtagtttttgctatgctgcagccagatttcaatattggtggcacatgtttctcacaccaattatcagtgtacgactttatctaatctgttaacacaagggtgatggcactacctgtctatgaatttggcttctgttaacacaaggatgaatcttagtattaagagtctatttcaaaatatataaattttattggattagacaaatactacatgatggcagaagtgggtgatggatgtagagcaggaagctatagaggcttacaagcagattgataaattgaagaagaaacatgacaatgacattaacacacttgataagctacttgtaaaaacatgtttgcctaattacgaaatacaacctactttggatgactttgttacgcctatttgtgaggataccagtgtgacaaactatgttaatggtcaatttgagttcattataatatgttgcgaggaatcaatatccttaggactttgggttgttgacattaacgaatttttctaagagcttgggttctaaaatgaactatgtgagatagcaattttaggaaaaataccaaataagatttaaaaataaatcaatagttgattggtagttttagtttagaagttcctttgacttctatactgccagtagacactcattctgtttatagagaagacaggcatagcctctgaaatcttatacaaagattaattagtttgattgccatcacagagagcaatcgtccaatgtttttacccttgaagactgatttcatggatattaggatagtacaaaattgatctggagctcagttttccaagccagtgccaatagtgaaccctagctaaacatcatatgccacatatcatttaagaaatttattcaataattaaagatattgcatttcctctcatttcatactatgttattgttggctttagttgagtataatatgttagaactcagtttcagaacatagaaataaatgattgcttttagttgtgtggattgttattgtttgagacttgcatacattgctgttccagccttacatacacttgcattagtgcaagggaataaaaagtgacgaattatgaatatagagctccaaaacctttaaatacaagctataattttcatttagtttattgtttggcaagtatttattgtcatagctactatctgcagataaatatagatttcctaaattctaataaattattacattaatatatgtggtgagagaggagcatcattgaaagataaataaagttttagccaggcagctgtcaagcataagttgcatctaactactaatctcctcatactccattatttcctcgtcttgattcatgccaattgtttgatttcttgtactttgaaattaactgctcttttccttgatcagatatcccattgcttccatcaattattatacttctacctgcaaatagtcattgattaagaaataatccattttattggacaaaagatgagctgataaaagaaaataccaaagtgaaagttcaattaataatattaacacctgctccgtgagtatagttatcctagttgctcaatcgtttgccatcactcttctaagctccttcatactgtaaattaatcacaatagacaacagagtgtctctaattaaaagtcatgtttaaagagtatatataatcttattgggtgatatatttacttatgatgctttttttttattttgtgttacttcttatttgtatgacaaataggaagagaaagagtgcacaaaattgataaaccacaggttttattttggcacaaaattgataaagcttggtaagttctacaagtgtgatgcatgtttcaactttcaattgataaacctcagtatttgtgctggtctgttccactgacttagtaatacttgcagctgaagtagcaaaaagccttgataaagttgatggtgttgtggaccatggtgttgtatctaaaatccagttagttttctctctttaacttttatactctttaaataagtagttgagaatcactctgattgaactgaactaaagataagatggtcattgcatcaaaatatcttaacagagcttttagagaaggccaagtctcaggttaatgtgttaaagaagcaatattagcaacttgctgaagttgttggaagatgccctgggcaatattataggtgattaagttcactaaagagaaactgtttatcttctatttatttttttgtgtatgtaactttttttgtgtgtgatgtaggtatcatggtgattggaagagtgagacacagtctgtagtttcaatgcttacatttatgccttggtttgaaacaggaagccttcttgagcacaaggaggctgaggaaaaacttgggtgtatgttttaatactctcgtgttagttattggcttgtcaatcaatgttttattctttaggtatgtatgcatgtatgcatagattgatttcattaagcactattattaacgatttactaattttcaaatttactaattgaatacattatgatgtcctaagcttctaagcggcaggggaatgtgggtttcaaactggtatcttttgtaaaataagcttttgcatgcaatgctagtagtgttttgtccctaggcaaagtattgaaggacttggtatgtaccatattgtaatccaaacattacttcttaacgcagagaagggaaaataaaaggaacctcatatattagtcattaactgtacagctttcaaatggttgttctgaagaacaccatatcatgcaattatgcatgtctgcatgttgctatatgaaagaaacagccattgttattttcgttgtaaagaaggtcctgctgagtttattgttatttttggtgtaacaaatgtcctacagaatttgtccagtgctacttgctactggtctagcatttggcattcagatattctaaatctaaatgaatggtgcactttaccttggtgcagaatggtaagatcaagggactggattcttacatatataatttataatttattttataggtacttgtaagctataaaaatctgaaccattgattgtccaattggtgggtatcaactccatactttaaaatttaaagtgtgccccaaaagtaccaaaatcaaaagattatttaagctggaatacctttgaattcactgttttacatttaagagtcttgcctcatgtaaatttccattaacacgagttttaacatctaattgggatagcttatcttttggacagttaaattttccaacctttttcaatgttgttctaaattataagaggcattgtgattgaaattatgatcgtaataaacttctatagttgatagtttgtatcagattagattattggacaaatagttcacagttgaccatttatgtcaatttatttgtttatcttctattcttctatatgcaccataaccattcatgtcttttgtgacttggaataagtggaaacaaaatgtattctttttttccctccctgttttttgctataatgctaattactttccacacatagtcactgagatttttaagttctatatgcttattgttcttttgcagtgaatagttcagaatttggcctagatgttgaagattacttaataggtgagtcttctaaacatgtaattgcattaattgtttttgtctaatgatcatttatggagatgaatatgattctattgcatgctttcttaggctagcttccttcagggagtgttgactaatttaaatatgattgtcattttgaagaacatgggtgtggcagttagaatcagtagggtttccaaggcaaaggagctcaataaccaaatgtgttatgttataatgttatatttagtcattgctcattaatacaaatgattcttaagtcttttactctgattaaagaagtcaaccaaagtcctccaacccataactcctttaaatgattgggagaatgattttctgttaaacctgatctgattttgtgattcaggcaatatttctcttccataattctttatccaatgccctattttatgccttattattctaaatttataattttttttctcacataacaacatagatattttaatttttttgaatttaattcaattataatgataatcggtataatagtctttaattaatatatttttaagaaaataattgtttgaatatttgttataggatcacaaaagttattattttaaattagtttataataatataataaataaatattttttttttatgattgagattaaaatttaagtttatcaaaatatagggccatgacctccaattatttgttagaataaacagattataactgggcaaaaatcacaaaagtcaggaagacagcaaaccacggttaaattaattttaaattaaaaaaatattttaaactgcttttatgcctttcaaaatttaaacggatgcaaaggcaaactgcaataggaacagaaaggtcacgcatagcctttggaacttattcactcaagactcagggcagagcagagcacggtgggaaggatcgcttgggcaaaagcgcgcatcaatactcaagcaaccatccactctctatctgtatatactttgtttattcgtttatatagtggatatacactgcctctttcttttcttggttcttatccttttgcatgtatgtttgatctctatctgtttcttttcttgatttttctccttttgcatgtataaatggataccaaattccgcttctctacttcatcactctcatcgtttttgtgttgattttgatacaaggtatatatgtggtcataatggttctctgtttcaatgtcgcaatataccttgtaattggatgttttgaattgcaaatatattaaataagtttttaatatcagtgtttttaaagcaatctataattttagaaaattagtttgccttaaagcttttgcctgtcattttcctatagtgtatggttgataattgttatattatttaccatttacgagtatcaaccaattcagagtgcatgcttgataggtctacaaatttgagtatagtttacttccagtataatactcttgaaaataattggtctcacttgataccatcaaaacttataaaatccaccaccattactatcaagagtacatctcaagttcagcaaacaaataagagtcagggaggaggaaatattagcagtgatcataagaaaaacttacatcttttttgtcagacagcatcacagatggatctagtacactaagaccagcaacaatatagacacacacatatacacacacatagacacacacacacacacacacacacacacacacactgataatggttctttgtttcagtgtcgcagtataccttgtacttggatgttttgaattgcaaacatattaaataatttgttcttatcagtgtttttaaagcaatctataattttaaaaaatcagtttgccttaaagcttttgcctgtcattttcctatagtgtatagttgataattgttataggaaaaaagctctttatttggacaaagaacatgggacaggacctaaatcgaagtgggtgactgaaatggtctacaacttatttgaaatgcaatagttgaatctcctgcaataattacaaaatctgtccaattgttttcatctggagagcctttaaggagtctttctaattgttactttactgcaaatgaagtgcatgttggatctgtaattgaaaatgctactgcacaagtttaatgcaaataacattttctaacaatgacgtgtccagttgtggtgcattctatgatagtcataatttaaatttactgtgtctattttatctattaaaattagtatgttgccaagtttgggctccacaggaagcattgccaatttgtgctctgaaaattaggatttcaatatcaccaatttgtgctctgataatatatctacatattttaaagtgagatcatcttatttgacacattttttagatcattgacttgtgcctcctttcacagttttgttccacttgcaagttatatagttaataggtaatttgacaactaatagatcttatttatatttttttccaaaacatttgcatgcaggattgataaagaacttaggtaaaccagtgttaatgtttgttttttgtaacttttttaaaattacaatgatagtctttcaaagtctccttctctgccatttattcttctcttcctaaatcatgtgccttttaacccaattgataagtactgtcttttttcaagtcattaggaatggatcataatcaagttaatacaaaagaaatggctgaacaaatgatgcagattgaaagaacatctgaacactgtatcaacactgtacatgttacagatttggtaagctatcatgatcatttagtttaatgtacatataccattatgtagataactgattgcctattggtttttatcatacatgtagccatatgcagagattcctagaagctgggcactgaaatggaaagaccagctggatgagacatggcatctaattgatgctaatggtaatcatcatatggtaaagtacaacatgtgtcagaaaaatcctcagattcgcgtaggttggccatcagttagacaattttatcatcttcaaggtaattttcaggtaacactaacacattatggagaattagtgttttttattactgtatttaaaactgcctctgagcccaaatcattcccaaaatggcactccctttacaaacaaaatcctgagagttctgttttccgtgtttggctgaatgagtataaggtttctgtaagtgcattggtaagttttagctaaatactcaaatttttatttttttaatgaatgcttactacatatatctgacaacattctttcgtgctttcaggatgttcccagtgaactgtattactaccttaaggatacaggtttcacaactgtttgttttgaagggacagctgtatgcaagattgtatttaaccactggagaaaaagcgctaaattaggtgctggttggaagacttttgcacgagcaaacaatttaagggctgatttcgagtttattatggaatttccctaccaaggttgcaacatagctcactggtggatagcttgattgtaacaaacaactttgaagacttttaacttttatattttcaatgttaatagaaactttatgcaatagtgacaagttgttctagactacctatatggtttatatttgtatggatatatatgtatatatatatatatatatatatatatatatataagttggtttatattttatttgtctttttgatcaatcttaacatgcttaatgcgataatgtgcacttcaatgtataactaacccgtgcgtatgcgcacgggtcctgtactagttgtcactaaaacaaatggacgcattactatgttgctgctctaattattgttttttttttttacttttttgatcgctaaagaatataaatgtcagatgaatcatagatgatgcaaaaatgaaaatgtattttctttataaaataatgaaaaaaaaggtgatacactaaataatacaaaagaaaattatattatcatttataataaatttgttaatttttataataattacttaaaaattatagctacaatgatttttaattaattaataatgtaattattctaaattgttagtatataataattaaattctaaactattttttattaaaaatctaaaataatttactcatcagagtacaaataagatataatattttaaaatttattaaaatagataaacaacattttattgttttcattttctaacaatagacaataaacagtaaaaattattatctgaaaacagtaaaatagataaaagaaaataaataatatatgaataatgtaaagtagtttcacattttcatatatatatatatatatatatataataacaaagtactataaaaaagtataatattttttcttataataatcatctttaaaaattatattaataattaattttattcacggttgtatcaatttttacatatccattacatcattatttcttttaaatttaaatatatttttcttccttccttatatatttacaaagtttagatttcatctttaaaagaattttggacctaaaaaaattataatttgttattttataacttagagcaaagctgaatttacatttataacttttttacatgcataactgatatagaaaatatatatatatatcaattatatatataattaatgtgaaaacataattattatagatacaattgaatcttgtttaagataaaaatatacattgtcattttataaataaaaaataaacaatttttttagaacaaaattcaaatttattaagaccaattgttagttttcggatgagatattcatcctattaactgtgtggacgcatttgtccaattgacaggataaatattttaatttgttttagaagacattatatattattaaaccaaaataaatatattcttaaaattttgaaaatataattataacgatcacagattcacagttttatgacacttcatcgtatgatttctctgctgatgacacaaatgtcagattgacaaagataccagatccacacaagccagaaaaacaacaacaacaatatcaagttccaaaccaaacaatcaatacaataaataaacaccataatgcaattcacataaaacaattttttaaattatacaaatataaaaaagagagaaaaacaagggaatgtgaataggtgtcacagaatacgcaaccctgtgatctcctgaaaaacctatttcttcttttgacccttctctcactcctcagtttgttacctctttctctctctctaaaaattatttctctcccctaaaaaattctggtttctggttacctctcactcttctcttcttcccccccccccccccccccccccccccctctcctttcttcttttttattttattttatttctgctttctcacaaaacaaaaccctactcacactcccactctcttactctctcagtctcaaacttgcgctaatttaccattctgccccctttttcggcgtcgcagtatttgatttttttttcggtttttgagagcattgggatggtttcgcggatctgcaagtttggttctttcaacgaaaattgaaagagagagagagattcggtttcggtttctctctgcttttcttcttcttcttcttcttcttcttcttcttcttcttctgttttcgtttgtgaaaactgtgtttttgtgttgttgtgaggtttggaatatatgtccttcaatcaatcaaagtccgagaagaacgacgcggtttaccgaaaaaccgggcgatccgccagcttcaatcagcagagaggaggctcctacggcaggggcggcggcgggaccgcgccatcgagcaattcactctcctttagccggaggtcagttagggtttgccaatttgtgtctgtgtttttgtttttatgactgaattttgaatctttgattgatgttgttagaataatgttgatggtgtagattgggattttattttgtttttagaatttggaatttggaatgttgtttatagagtaaagtgtagtggtaatgtgttgtaaaaaaaaagaattgattaagtgttggcattgtgattgtgattaaaaatacgcaacaaattataatcaattgttgtttgtagagtagtgttctgattgcttttttggagttggatgcgatttagagtgtgaagtgtggtgttatgatggatgaaaggaattgctgttattgtgattgtgatgaaatctatgttgaaggatgtagattgggatttgtttttggaaactggatgtgttaatgtgttataatattacgtgttggcattgtgattgtgatcaaatgtaacaaattataatcaattattgtttgtagattagtgttgaaggatgtggacaatcttttttttttttttttggaatttggatgccttttaaactatttagtgtagtgttatgatggatgaaaggagttaaatgttgacattgttattgtgataaaatatataacaaattcccagccaaaaaaaaaaaatctatacctttaaactctattctacaaacaataattaattacgtgtttgagtgtaaagtgtagtgctatgatggatgcaaataattaagtgttgacaatattattgtgataaaacataagtatgtaacaaattagaattatttattgtttgtacaatagtgttgaagggtgtagattgggaattctttttacttttttattttgtggaatttggatgcattttatattgaaaagtgtagtgttatgctaagtagcaccgacatgactcttcaataagtctatcttaaaaaaatatggatttcgacacgttgggacacttgagacacgttttaatattaaataataattttaatttatatagtgtatatttcatttaatattcaataatttaacaaaaaaaattaaactaaactaataatatccatcaatgtaacaaaaaaaaaaattcaaagaggaagcatgcgttgcaagtaaacatatataaagtgttgcatgaaacatttgggatataggacacaaatcaaaagattatgataaatcttgtgcattaaaaaagaagaaagaagataaagaacaacaaagtttcacaaagaatagcattgaacattgccacaattaagagattaaaattaaagaagaaaaaatatcattgaaatttacaaaaaaaatgtttatatatagaattaaaatcaatttgaacttcctaacaaaatttaaattatcatcaaatttattgagattacattagttaactaaatacaaaacataaagggtaaaaatctccttcggcttcacttcctttaatgagaaacattattgggtacctgaagataaaaggtaaaataagtaagtagcagaaaaagaaaaaaaaaatagtgatgaaaggaaacgatggagggaaatgcctgacttactttaatgagaaacattattgggctgacataagcagagggatctaagtaaaattgggagtgagtgagtaaagtgaaggatggaatctgggtctggcgaaggggaagagcaacacgtgcctttgagggggagagtggagtggtcagatgttacttgggttcctcaaaacgacagccctaacccagtcgttccgatccagtatacagaagagttttcccaagttatggattactttcgcaccatttaccttgccgatgaacgctcccctggcgccctcgctctcactgccgaagccgttcaattcaactccggcaactacactgtatgtcaagttcgatgtaaatttgattttaaaaatatcctattgatgcttactgaaaggagattcggaagaaagaattgaaaaggatactcttcacttccttcaacctacgctccattttctccttcgcttttaatttgattttctttcatttttatgaaaattccatttgaccgtgtcagacacggtctaattcgcgtgtcgaaaatggtcaacgtgttgggtttgttgaccgcgtgtcggacaccgtgtcgaacacaacacgccctgtttttaatgtgtctgtgcttcacaggtgttatgatggattaaaagaattagttgttgttcatagaatagcgttcgaagtgttgacattgtgatagaatagacatgtatgtataacaaattataattaattgttgtttatagaatagtgttgaagggtggagtttggaattttttttttttttttggaatttggatgtgttttagagtgtaaagtgtactgttattatggatgaaaaagttaaatgtacattgtactagtgtatactaaattatgaagctgtgaaaatcttttttttttctcttttttaaatgaaagagttgtcaaattctcatttttgtgacatgtggtttgatgatttgttatttgttatttcccataccatcatgagtagtgttttttcattggatttcttttttcttccatacttttttttttttattgattctgtgtgttgcttgttctagttttaacaagaagtctaataatgcacaaggtgggcaatctagggtacacccccagggcattcaacagagtccaatagtgcatctactgcccgaaccattaatggtacccctgtacagccacaattacatggtaaggtttaagaaaaatatttatttatttttgaaaaaaaatgtgattcttctcttcattgctttttagtgtctggttatgttgttcagttttcagtagaattttactgtagaaggatttgtggatgatccttccctctttattaaggaagaatctgctgatgttgttgaggttattgaatgtttggtaaattagtctctcatctttttttatggaattcattcatttatgttgtatgatagaagcatcagatgggccagctacaaagtcgtctgaatcatcagctgcacataggagtgctggaattcttccaaaagctccagcttctctacaggcgcccttgatttctgatccagtcccttcctcaagccctgctaagggtatgctagtactgtaggtttttgttgtgtactgtgtacattagatgtgattaacaactcttttgtagcttgagtcatagtaaatagtcttcttggataaagattttccttattattaacaattagttgtgttgtgagacgtgagtatctaaatatttatatctgtcccaggagatgcatctaaggcattcccttttcaatttggatccattgctcctggctttgttaatgggatggcagtaagtttcttgtataataattgatcaatgtctggcacattacatattatggaactttagggtgagtaattgatcatgttcttgttcttgtatgcagattcctgctcgtacaagttcagctcctccaaatttagatgagcagaagcgtgatcaggtatgcaatttattatttttcacctctttttccttaatgtttgcattatcatacagagaggtacagccactacacacctccttccaaactaaagagcatttcttttacattctattctaggaacatgatctggtttagattttagacatagaatatgagaaaggactgctattatgctttttgtatgtcttattaatatttacattattagagatatcagtattcactaattgaagttgaacttgttttatgtcttttcatactaatgaaagtttttgtttgatgtataattccttaactttcaggctcttcacgatcctcacaagtctgtgccttcagtgccaattcctcctgttccaaagcagcagcaaccacctaggaaagatgctggtgtcactgagcaatctaatgcaggggacagttgggaaaatcatatagggtttaaggcaaaaaaggatcctcatgtgtcagctttgaccccggcaagccagatgcctaagccctctgttcctgtaactgggatttcaatgtcaactccatatcaccagtcacatgctcctttacagtttggcggtgctaatccacagattcaatctcagggtatgtcaacagcatccctccagatgcctataccgatgcctttaccaattggcaatgctacacaggtgcaacagccagtttttgttccaggtcttcaacctcatccaatgcatcctcaggggatcaggcatccaggccaaaacatgagttttgctcctcaaatgggtcgtcagttaccccatcaattaggtagcatgggcattggcatcggtcctctatatccccagcagcaaggaggaaaatttgctactcctcgaaaaactactgtaaagataactcatcctgagacacatgaagagctgaggcttgataaaaggacagatgcatattcagatggtgggtcatctggtgctaggtcacatcctaacataccttctcagtcacctgttaaatcatttccggcttctcatcctgcgaactattattcttccagctcacataataccaattccctctattatccacctagttctcttccattaacaagtaacccgatgtctcctaattcgcagccaccaatatttaattatcctgtgaatcatggttcgcaaggcgtgaatttcatgaattcatcatcacgtggttccccacctattaataaaactccaacaggggttgcatctctgaccattaagccaagtggtatgtctgctattgtggactcatcagtgtccaattccagtatttctgatgttcaaaatacagaatcccctagttcaacagcatcttgtgatgctagctcctctgtgctgcaaaaagggtctgaaacttgttcagaagtctttttacaacagcacaagttgtctagtgattctgtcccagttgtgtctaataatgaaggcgggagggaatctcttagtaggtccaactctttgaaggataagaaaccagggaagaaaggtcaattatcacagcatcaggtatttgagtgaattattattcagatacacacacttaaacatagtggatgtactttttagtatgcatgtgacctttgtgtgcatgagtataatgtgtactttgtcttttcccacaggtttctgtacaatctcccacagcggataatgtgccttctcatgctgttgaccgtggtatatctgatactggagtttccaaacctgtaggaactaaaacaaaccattctgcggaaattaccactgaagaccttccaacatctaatacaatacctagtagcacttctactgctgaagtgaaaaccaatgggtctgcagaagtttctgcttttgtatctggtgcacaaactgttgacagagtgcacaataataatcctgataggatagataaattagctgaaggtaaacaactaaaacattatgatgaaagtgatgagccatcatcccctgaaggatacaaaccaaatatttactttaatggaacagaaattaaactaactgaaaaagatgctgcaattgtaagcactgtcttaacctataaaattatacaacggaatactggatgaatctgcaagttataatgcaaaatgtgtaataggtgataatttaggcacatgtactactaccacattgcattattctagggatgtctcttttagcagaaataatagtgtagttactaatggatttctttcaggaaaatttggcatatcagatctgcagtctgctgatcttccagagacaacatcaatgcatgtcaaggatgcttcagagaatactggcggtgagtcaggtaccaaggatagaccaactatagaatcaaataaggtgaaaactacatctaaagggaagaagaaaagaagagagatacttcagaaagcagatgctgctgggtcaacgtctgatctttataatgcatacaagggacatgaggaaaagaaaggtgtcttaagttctgagagcacagaaagtaccactactttgaagcagttgccaaaagatactgctcagtcagatgctttagcaagtgaaaaatgtggtcacagtaaagctgaactcgataactgggaggatgctgctgacatgtctacccccaaacttggggttcatgataaatctcaacaagttggtgatggaagtggaagtacagccaaaaagtattcacgtgatttccttctgaaatttgcagagcagtgcactgaccttcctgaaggttttgaagtcaccacagacattgaatctttgatgagtgccaatattggtagtcctagtcctggaagaattgtagatagaccaggtgggatgtctcggatggatcgccatggggatgtggcaatggaggatgacagatggagtagagtttctggtgcttttcgttctggacgtggtttggatggcattggaggtaatgtgggattccgatctggccaaggaggcaattttgctgtctcaaggaaccctcgtgcacagacaccaccacaatttgttggagggatcctttctgggccaatgcaatcagtgggaaatcatggtggaagaaataaccctgatggggagaggtggcagcgttctgctagcttccagcagaggggtttaattccttctccttcccaaactcctttacagatgatgcacaaagctgagaataagtatgaagtgggtaaagcaacagatgtggaagaggtaaagcagaggcagttgaaggctatcttgaacaaactaactccacagaattttgatagactttttgaacaggtgaaagcagttaatattgacaatgcagtcaccctcactggtgtcatctcacaaatctttgagaaggctctgatggaacctaccttttgtgaaatgtatgccaacttctgtttacatctggcttctgagttgcctgattttagtgaggacaatgaaaagataacttttaaaaggttattattaaacaagtgtcaggaggaatttgagaggggtgaaagagaagaagaagaagcaaataaggctgacgagggtgaggttaagcagtcttctgaggaaagagaagaaagaagagttaaggcaagaagacgcatgttgggtaacatcagattgattggagaactatataagaagaaaatgttgacggagagaataatgcatgagtgtatcaagaagttactgggtcagtatcaggatccagatgaagaagacattgaagctttgtgcaagctaatgagtactattggggagatgattgaccatccaaaagccaaggaacatatggatgcatattttgaaaggatgaaattattgtcaaacaacatgaatttatcttctagggtgaggttcatgttgaaagattccattgatttgagaaagaataaatggcaacaaaggaggaaagtagaaggtccaaagaagattgaggaggtacatagggatgccgctcaggagaggcaggctcaagctggtaggccaggtcgtggtcttggcaacaatcaatcagctagacggaatcccatggattttggtccaagaggttcttctatgctgtcttctcccaattctcaaatgggtggactgcgtggtcttcctactcaagctcgtggatacggtgcttctcaggatgctcgatttgaggaacgacaatcttatgaggctaggaccttgtcagttcctttgcctcaaagaccctttggagatgattctataaacttggtaccccaaggtggtcttggtaggggaatgtctatgagaggatcaacagcaatttccaagttgctaatatctgatgttcttcctgtccatggagactctcatagaatgaatacaggtcttaatggtcacagcaatttatcagagcgcacaccatatagctcaagggagggtcttgtttcaagatatggtactgttaggtcttcggggccatctgcatatgatcaatcaagtgctccagagcataatgtaaaccatggtaacagagacttgaggagtgatgatcggaatcttgaacctactgctcatttgcaggggtcaatggtctctaagaatgcttcttcagagaagatttggccagaagaacaactgagggacatgtccttgtcagcaataagagaatactacaggtaatgtttttctgtggtacttttattcatcgcatagtattctatttttttatttttatcgggggccaaatttaatcgttagattgtagaattctattaaccaagttagattcacaatgtatgctgatgcaggcagatgtgttttatttttctatctttttttttttttttaatttatactgatgaatttgtttccctgttttcttgtcatttaatcatttgactgaaatttatgcaattttcagtgctatagatgagaacgaacttgctttatgtgtcaaagatttgaactctccgagcttccatccttccatggtttctctctgggtcacggattcatttgagagaaaggatgcggaaagagatcttttggccaaactacttgtcaaccttgtgaaatctcagcatggaaccttgaatcaagtccagctcattaaagggtaagatttatttaataaccatatagtgactagcagagagaatacattcattgtgaagataaaggtcatatgattcattcctttgtatgttttggctaggtttgaatctgctctcggtacattggaggatgctgttaatgatgctcccagagcagctcagtttcttggcagaattttcgcaaaagccataacagagagtgtagttactttgaaggagattgggcagttaatacatgatggtggagaggagccaggtagcctcttagaagttggacttgcagctgatgttcttggaagcacgttggaagtaattcaaagcgagaagggggacacggttctaaacgagatatgttcagactctaacttgaggttggaaacttttcggccacctaatgctaaaacatcaaggaagttggaaaaatttatttagatgctagtgatgcctattgtatgttttttttttttttttttgtgtagaggggaaaaattatttggctagtgcttttttgggggtactcaattttgcagagaatggttttctccgtgagatgggtggatagggttttatatatgggattttctgtctttatattctttttccgacatcttcactgcaattgtaaaaggttcaattgagcatcagaaattttaggcgtagttgcgacgcctgcttgatgacctttacatatttctttgtagatataaaaagttcaatgagcatcaagaattttattttcttatcgtttttggatgtatttcattaatgcttgaaaaatgaaatgcaatagagaaaataagagaaagtagttttatgctaacattcaattacataatgtggatgataaatttgttgatatttataataattatttaaaaaatcatagtaagtatggtttgtgattaaataattgtaaaattactttatattgtgaaacttaaactcaggctataattttacttggtaataggttgtgacgaaataatgtgaatatcaaagttactctttaagtattaattattttgagtaattttgtatttttattatttattttttgaaatctaatggttgtaatgagtagtttaaatacaagtttttgcttaagaacaaaatgcactaaacataaaataaagtatccaagcctgaatagtagaaaaggattttttgttattatcatttcattcattaaagagttaaaagtaagaattaatatcggtgtagatatatgtagtcttcacaaatattaatgtttcaaaaactcattttattgttttaatatattttaaatacaaaatatattctttttattccgtgttagaaacacttcattattactatcaatattatgtcagttgtcatgtttttcattgtatttctcattgtattttttgatattattatgaataaaatgtcttcctaagttgtctcctctcttaaaaaaaaaaaaagagcaaactacctgttgcacggctacaacatgattttcaacaattttattttattttattttttattttattgtattttctatgtttgtgtttttcgatcaagtaatccgtttgtcccaaaacattttttttatctgcttccttctttttggtacaacctaaattgggttcaaatccttaaatgacccaaaagttaggggcatctactaaataaactatacagtatatgaatttttgaaaatgccaaaagtgttctcagtttgtttattacctggtgcttctctcgttgcttagttgttttggtttttttgctgctccttgctcaattgatcttgtggttgcacattagaggtgttggtgttggaggatgtagttgggggtagtggtagcagcgttcagtggtaacagtcgccggagaggccatcgtgggcggtggctgcgaggtaagaagtctgaagctgctgttttctaacaaacggattacttaatccataacaagtatacagattaagtaatccgtatgaggctaactgattgagtaatccgtatgaggcttagagattgcctaatctgttgtggttgcgcattggaggtgttggtgttggagggaggtagttgggggtagtggtagcggcgtttagtggtaacagtcaccagagaagccatcgtgggcggtggctgcaaggtaagaagtctgaagctgttgtattctgacaaacggattacgtaatccgtaacaagtatacagattaagtaacccgtatgaggctaacggattgagtaatccgtatgaggcttagagattgactaatccgtaagaagcttgcagattgcctaatccgtaagcctcgtatggaataataaatctgtatggtttatacgaattatctaatccgtataaggcttacggattaggcaatctgtaaacttcatacggattagtcaatccgtatgagggttaaattatttttaaaaaaatttaatttaattttagaatgaattttgttgtttataagtcaaaataaaagagtttaggtgtttctaatgtgtataatattattatgtgtatgttttcaaagtgaaataatattaattttatttgttaagatggacaacgacgactgcatatataatagtatgatgtctgaagaaattaatatggaggaagacattgctgaagaagttgatgcgtttgaaaatgtcaattgttttgttgattgtttggtagcattcaataccaaagaggtatatatttgatttaacatttagttaaagtagttaaatgattgagtttaactatacacaaatgataatacccaacaatgaatgttccatttttgtaggtgtttgtttcccatgaggatgtattgaaatgggctcgaagtgttgcatttgataatggttttgtagctgtcataatgaggagtggcatggcaaatggaaaactgggaacaacatcatatgttataattggctgtcaaaggagttgaaagtatagatcaatcaaaaaaggttttgtacctacaacgggtagcagtagaaaatgtgaatgtccgtttaagctgagagcaaaacccggcccaggaggtgaagggtgggttgtgaaattaatatgtggcatgcataatcatagtttggctaggtcattatgtggacacgcatatgctggtcggctaactaaggaggaaaaaatcattgttgctgatatgacaaggtcgctggtaaagccaaagaatattcttttaactttgaaggagcacaatgccaataattatacaactttgaagcaagtgtacaatgcaaggtatgcataccacacgcagataagaggtgataacactgaaatgtaacagttaatgaagcttcttgaacgtgacatgtatattcattggcgtagaatgaaagaaaaaaatgtggtacgtgacttattttggatacatcaagattcagtgaaattgagcaatgcatatcatgtggtgttcttgatcgacagtacacacaaaacaaacaggtacaaacttcctttacttgacatagttggtgtgacacctactggtatgacattttctgctgcctatttagagacggagcggttaaacaatgttgtgtgggcccttgaacactttagagggatatttctgaagagtgaatttttcccagaagagattataactgataaagattcagcattgatgactgctgtgaaaattgtttttccaatgtcaaccaacttattgtgtcggtttcacattaacaagaatgtcaaggcaaattgtaaaacttacatacgccaaaatttggcatgggactttgtcatggaagcttggggacccttattgattgtggtactgagaaagtttatgatgaatgtttgaagaagtttgaagttgcatgtgcaccatggtctgcgtttgttgattatgtgaaagaaacacggttggatcctcaaaagaaatttttttaatcgcatggacaaataaagtaatgcatctaggcaacactacaacaaacaggtagcaatttatttatagtaggttacattgtgtactattgaacaacctatttattttaatgtatgaacatttcgtcactaaatgcagggttgagtctgctcattggactttaaagaggcttctacagaataatgttggagacttatgtactgtttgggattccatgaacaacatgatcaccttgcaacatactgaaataaaaacatcaatagaaagaagcacccatgtcatcggacatgtatttagagtaacattgtacaagagacttatcggcatggtgtcgcggtatgcgttgaactagattgctgctgagtttgagcgagttcattatgcaggcaaaaatcctgctcgatgtggatgtgtcatgagaactacccatggtctcccttgtgcatgtgagttaactaaagtagttgttggtagcataccgctttcaagcgttcatgtgttttggtgaaggttaaatttttccgaccaacgaatggatgacatggaaattcacatcactgatgagatagaggcaatctccaatcgttttcagaagcttgacatgtgtggcaaaatgacgacgaagactaagcttaaaaaaattgcttttcctgatcaaacatcgatgaatccttccctagaaaaggtgagaacaaaaggtgcttcgaaaaataaacacacaagacacgagagatcaaccaagcgggatccatcttactttgaatatgttgatgaattacattctgtgcaaaatagttgctccacacgaaaaaggtatgcttcctcatctgatcgaccaatgaagaacagaaacattcctatgctagatcaatttcatccttttatgcagaagttcgttgttaacatcacttatgttaaagctgatgataattgtggatatcgtgtaattgttgtcgtactaggttatggtgaagattcttggcctttggtctgcaatcatttgcttaaggaactttcagaatggtttgatcaatatataccattgtttggtgggtttgataggtttgaacagttaaggcagtcccttcttgttgatggattagcaagggtaagacggtagtttcacaaatcttttactaaggtatgtatgatttgttagattcagatatcgaaagtaataaaatttgattgtgtaagtaacaatggataagtgaatggatattaccgacatgggttatgtcattgcttcaaggtataatgtcattattgtttcgctttctatgcaacaaagtatgacattttttcctctcagaagtcaacctcctaaagattcatctattcatcgcatcgtttgtattggtcatgtgtatggtaaccattttgttcaggtataacaagcaccattaatcaatatacttttattttgtttgacattggtcaatatgaatttacaacaaacattgtatttgaaacaggttgaactgatagtcgactgccctatctcatgcactacattcttgtgggctacacactgctcaaatgaggcaagacattggcaaattccatacattcatcgaatgaggctgtactcagatttcgttaagttaccaactgaatatgtcgatttagaataaattccttttggtgtactttgttaaaacgattataaagactgtgtctgacaagaatatattcaaaatctaacaagttccatgcaatgcttataaattaacaaatagtctgccaatctgtttaaatacaaaaagttaaaattaaattttaaacacaaatgatgtaaatgtatcaatcaggcaactcgtctcctaactgagtccctcaatctactcgtgcgcacaaagatgtttccacgctgtgtcacactacgtgctaatcccaacaagtgctgcatagatgagtatgcctctatgccaggaataacttgttgtgtgtcaagcatgtatttcaacctgtctgctagcctcttgcacataccctgttacaatataacacaacatataacacagtcatagtaatcaatattgcatcgtgacttcatataacttttaaataactaaaatatccgatatttttaccactacatgtggagtagtgtgaccatcatcagaagctggggcatgtgcatctggcgcagctggtgtgtcatccttatggctggcagggggtgtaggattatcctgtaaaatagtagtgactctcaaaggatgtcgtgtcggctctccagcctttagcgagcttataaatgaatgtgatacccgatagaaccacctcatatagtcactaacacactgactaggatatgtgaccaaatcatcagtgctaacattgtactcgaagaagtgactccatcggtcatcgatatcttcggtggacaaagatctaggaggagaactgtgggatcttttgaacacacccatattgtcgcatgacccgctctggtaaatggcgtaccatgtgtggcccccatctaatgtacccagagtgtaacgaaatcgtctcgaaatccatgtgtgcacaatgatcccaataaggcgtccagactacattatcaagactcaacctatccagccgcctacgataggttgaaactggtaaagccttcgtagctctccatcagcatgcatgtggaaatttctcctcgtactcggcatttggcatgacattcccaatggtcgggaaatgttcatacacccagcactgcagcacaacatataaaatgaattaacaacattcatagtattaatgtcaacataagtgaagcaacaaaatattcatgtgttgttattacctgtatcaatgaaatatatccggctaggtgtttcccgtaatgttgggatgcatagtttaagttgtcgtaaatgtaaactagtgcggctgcaccccaagcataccccgtcgattggtcaagatcgcgaaatgcgtccaagaataccacactgatttgtgtggcactcttgttcgcaaatatagtgcaaccgaccaaatgcaacaaataagctctcgcaactaatatccactgcctagcttcacacttcgcaacatataagtcgcgaagccaagacaatcgaacatatgccccgtggcattgttctgtctcagcttcagcatcctctattgttacctccaacaactcaacaacgagtgttattgcctcccccacgtcaattaccttatacgtctgtaagtttcccatgattgggagatgtaacaatgccacaacatcgtccaaagtgatgctcagctctccgatgggcaagtggaagctactggcctctgggtgccatcgctccacaaacacaaaaagtaatcccttgtcaccagtgtccacagaagaggaaatcaacgggtttaacccagtagctgcgacaaacccttcaatctcgagtgctggctttccaaactttgttaccttacggccatgggacgccaattttaactctgcctgttcttgcaaaaatgtttgtcagtaacaacacatacatagaaaaataactattaatttgtatttacttaaacacatcaatacctctccagcccacactcttagtgtgacatggttagcgtaatcagtcaaaatcgaaggatcttccggcccacctgggaagcattcagactcggtcccaacatcctcatgcactggtacatgttccggctccataactcgttcctcaacaacatgttcctcaggaacaccctcagttgcccgttgtcttcttgcaaatgcagtaggccttcaacgttcaccaccctgttctatagcccgacacaatcctcctctttgttcttgccataatctataccatttgttaatcaacatagtcataaacttaaaacaaacaaataacaaacatatatacatagcattggttacatattcagtcaatcttattttcatatcatgaatctatctactttcttcaacttcgttgaactcttaatcaaaatataaccaactaccatataacaatacttaatgacatgcaaattgttaactttgttggccacaatattcaactcattatgcttatacctgcacaatcctaacttatcacaatcccaacttattacatcaagcaattcaataattgcttatacctgcaccaaaaaatagtgtgtctactcaatgcacataagtcaccaatgtgaattaacttgtaataaacttatatttgaatcttgcctgttgggcaacttgttcaatacttatatttgaattacttatgctttagtttcaacaactaaagaaaatgaccatgtttcttaagttgtaaatatcgaaccattagcaatgtgatggacttgatctgatggctgcattttcttcaactatttcatttcacattttcaatgagatctaatttgtaacccaataatattggatggaaatatgccgattcatataaacatcatgtttgcacagttgttgacttttttgccttgacattcaatattatgcagtacttgttttacaattaattgaatacaactatggctcttgagctacaaagaattaactggattcttattgttggttaacctttcatgatgatgagatgataggctttttccagttaaaaattgtgagagaggcacaacacttgaggttatattgtcagtttaatttatactttacagtagacctacttggacgtagtttacaattagaaggaaatctggactaacaatttgtaactacaaaataagctactgcttcacaacaatagttctaactttctttcactttaataaactcttaaaatatcaaatttcatataactatatgtaatattgtcaatgatacacttacatcacaagcaactatatatgacatacaatgctgccttatatcccctaataaccaatccatttacagccattcaaatttcaacatcctaatatacataaattaatcagattttaacaaatttaaaactatttttaaggttttaagttccatacggatcacctgatccgtatgaagcttaaggattgtttaaatatgtaaggtccatacggatcaggtaatccgtatgaaccttatggattacacaatccgtaaggtccatacggattacatgatctgaaaggaacttacggattgtgtaatccgtaaggttcttacagatcaggtaatccatatggatcttacggattatccaaaccgcatgttacatatggattaggtaattcgtatggatcttacggattatacaatccgtagtgaccatatggattatctaattcgtatgcaccctaaaaccttctcacggattaatcaatccatcacatcctcacggatttatcaatccgttcgacacaaggcctcaccttcgtcgacggacgcgaacaccgaccaccacctccaacgtgaccaccaagccggaccaccaatgctgcctgactctactgcctacttcaatgacgtcggagagctgcggaagaatgtgccttcagatacgtgtaggagaagaagggagattcatagaggaaaacaaaaagtgtttcttctgctattcttgtttttaaaatttaatgaaaataattaaaagggtaattgtaaaaatgcattgtgtctatataatatataagaaaagaaaatatatagtatatttagtagctgccaaagttaggtactaactcacaagagatacatgttaaagtcatgaataacttctgcataaacaaatagacagaataattagtgttgacttgaaggatgtgtacaataaattaattaatttctagaataacattatataacacatcgccttctgaaaacaaaagaatatgcatataaaacaaaatctattgaattattacacgaaaaaatagttagcaaagagctgatgcatataaaagacaagacgctagccgaatcatataaaggacaagaatattcaacatgataattttcaaattaacttgataatgttagtctttcataattgctataggaatagcgaatatttaacaaatttttttaaattaacttggtaatgttagtctttcataattgccataggaatagcgaatatttaatataataatttttaaattaactttgtaatgttagtctttcataattactataatagaaatagcgaatattcaacatgatttttaaattaaattggtaatgttaatcttttatatttccgataggaatagcgaatattcaacatgacttttaaattaacttgctaatgtcagtctttcataattgcgataggaatagaaaatattcagcatgacttttaaattaacttggtaatgttagtcttttataattgttataggaataacgaatattcaacatgacttttaaattaacttggtaaggaaggaaaggcaaggccgaaatcatgaagacgtttaaacaagagaagtactttttgttgatccttgttttgttctttcactccttttgtgttaatggtgcgcatttggtgctgatccatggagcccttcatggtgcatggtgttggtataaggtggttagtcagttgaaatcagaaggtcataatgtcacaactctagacttggctgcttctggtatcagtccaaagcaggtgcaagaggttaattcattttcagagtacaatgatcctttgatcacattcatggcctctcttcctcgagaggaaaaggtgattcttgttggtcacagtcttggtgggctatcagtatctgttgccatggaaaaataccctgaaaaaatcactgctgcagttttcatcactgctactgttgtctctcaaaacctcacctacctaggttatcttcaagaggtactattctgactagtcacatttacaaccaattatctaagttttttcacttcatgtttgttggctcgtccaaaatcatgttgaaatattagttagcgtgattttaagtgtatttttttgttattatattattggttcaaaatatttagtggcttatcaatgattaatctttgtaagagaatttgacttatcaactttcatgggattttcttcttttaatcattttttttttcatttataatgttcgaatctgagaccttatttaagagaactgagtttagtgccacttggactaaagattttttttaatcatattattggtacaaaatatttatccactttgcctatgattaatctttataagaaaatccaactagtcacttttatttgggttcttcctttctaattaccttttttttctatccacaatactagaacctgagatcgtatttaagaaaatcaagtcaaatatcatttatacaacaacttgtatgtgtgtttcaatgaatattagtaaatttatttacaataaagttgtttttggttaaaatggattttgaagtaatctaatttatatttagatatttttataattaaataaagttaataataaaactgataagttttttatcctacaaaaaagctatttaatgttgtttgaacttataatcaagtgcttcattgacccaacctagaatgtagcaactaattttaaacctattttaaattgtgatagtgaaaatgtagttaaaattaaacgacttccatctgtcgtgagttttgttatttgtcattttacgcatcaaaacactgtttttactttttatacaatgaaaaacatattaagtcaaaattctccttagcatttatactttaaaaattaaaattttggttcacatgttttttattattggtgaatttcctaccttacgctagggtcataggttacgtaaagatagacaaaaattactaattataaaatggcaaatgttaatcactaatttaaaatattgattaaggaactaaaatatttttttatcaaaattatgcaaaattatgttgtacataactttctttacgcactcatataatttccattataaatatttctttcttttagttctttaactaatgttttaaagatattgattagcaaaatcaatataaaaatacaaaaactaaaataattatttttaaagtatagggattaaagtctattttaacccacaattgagggacataaataaattttacccatttatatattgatataaatgcattgaaacattttattaaattactattgtgaaaacatgacaaattgagaaatttatatatcactcatttaggttcgaagaagattaggccctgttttggaggaacaatatttcatattggatgtaccagctaacagagctccgttcctctcatcgcttggagtcgatttctttacaactaggttgtaccaattatcacccgctgaggtaaaaattttcaaatgaatttcaatacatagcctttctatatgttttgattttaactaaaataatataatcataccgcaagatgtttatttagtaaagaaaaataacctaatttttttaggatagctactttaggaagagttttacactgtgtttcctaagaatacagaaggacaaattgactaaggagggaatggaaatgataagtaaaaataagagagtcttactaaccaatgttattaatacattggttaagaaatttaaaaaaaattattataaaaattataaaaaagcataaaagaatcatggactcatcagaacataattttgtacatcatgctaattttttttagttctttaatcaataccctaagtgtactgtttaacatttttcaaaagattttggaaaattaacccatcattcgttcgataaaaggagacaaaggaaggaaggtgacccacatatgggtccatcgtttttttttataggttttattcatttttggacggaaaatgaagagaagcgtgtcattttaatacaatgagaaagacattactatctccgtctctgattatctcttggatttattttttatcaaaatattttaaacgataaataaaagataaaataaatccattctctctctcttgaggattgtatgagataagtattacacattaattaatgacttagttattttagtctctcaatttgtgggtcatattttttagtttctcaaattttatcagtccttccaattttgaaaactattctttttagaccctctgatcagtgtgtgcaaaataaagaataataaattgataatttattttagatataaattctggcaattaaaaattaaaaatcaaatcctgacgactaaaaattgtcacatagtcaatttattattcttcatttgagaaagagactaaatttaagaattaaaaaaaacatgtaaaatttaaaggactaaaataatatgattcccaaattgagtaactaaaacaataatttaaaccttaattaattatgaaaaagtaaccaagaatatctagaacaattgattgtttaaataattgtttatttaaatttgtgagtcttataatatcacataatttaaaaaaaattattcaaaaatttacgcaaatgccaaagtcaagttgttagagtgaatgattaatttgaactacattaaattttataattaaaaaataattctttaattgataagaatgaattaagcaacttatttataaacaactcacttaactaaggcattgtcaagtcatttatttcaattataaaaaattattaagcaaatgttacttaattttaagtaattcatgaagcacctacattagagatgctgtaagtaaaataagtgagatgatgagtttcaataattttaaagatgattttgaaaaaataatataaattgttaataaatttaatattactaattaaattaactaaattttgtaaaagataaagaatttgaattagttattgagttttataacgaaggtagtattatttggtatatcaaattttattctttatttaggattatgtcgttaataaatggtatatatatatatataaacaattgattaccattttaaatttattgtaatatgaacttgatttgattttgataaagttaatcttttgaatgtaaaatgtattgttcccctaggattaaaagtatggtttacttattattggattcaaactgatcaattaggtactatgcaggatttgacacttgcttcctctctggtgagacctttacctccatttgcaaacgatgttgaattattgacgaaacaaactgcggttaccaactacaagaatggaagggtatctaaaatcttcttaattgctgaaaaagataatctgctaatagaggaccttcaaaggtggacaattgaaagcactggtccatatgatgatgtagaagttataaaggattcagatcatatggtcatgatttccaaaccaaaagagcttatctcgaaactgttaaagattgcttataaatattagcctttaaatgttagtaatgaaatgcgtgtatcataaaattataaaaacatgtttatgggccatgtatcataaaaataagtacccaataacttttaatcattattataactatggtacttatttatgtttaattttagttaatttatggatgctgtaaaatatttgacgtagttattttaatttaatgacttattgctgcagtaattaattagtttttacgatgcatgggatgccgaattttttaaacaatgtaacgaaacgggtttagataacattgtatcaaaatcttcttttacattgaaaacattacaagaatcttgcaattatcgtattgagttttggtatttaacacaagtatcatgttgccaaacattatgaacccttttatacattgaactgcatcgaataagcccaaatagtgaattgattaatttaagctgtaaaacatgaattgtgttcaatctcccaaaatacactgtctcttttccattcctctataaggcttactattctttttaggagatctataaggctaactagcttcctcttgtaacatataaaaaaatacattgaaaatttggattataagaaaaatcttgtacgttacttatgaggggaaaaaaaattctttttgtttcaaatataaaaatgaaaatcaaatagatgtactgaaattaggctaatgataaaaagccttgagtaatttttagaagttcaaattaccacaataccactattgtatgaaatgaattaattctagaactagggccaacaattctcaaataagaattacttcactacaaaaaaaatcaaaatttttgacagacgaaattcgttgctaatacaaaaaatccgtcggtaatttcaatttttcgacggatttcagaccggcataaatcagtcgacaaaactgtcgttggaaatttaaccgaagaaattttgtccgtcggaaaaatctaacggtaagtatctgtgaaaaatttctaacagaactttttgtgggaaatttccaacagaaatatctgtcggtaatttctcacggattcttctttcggaaattatcgacggaagtatctgtcggtaatttcccatagatcatttcttcggaaattattgacggaaaatatctgtcaataatttatgttcaaatatattgcatttaatttattttatgaatatttttatttatttatattatttaacatcattataaaaattaacacataattttattatataaaggctccaattcatacatccaaaagaaatgttttaacaaattaacttaacttcgaaataaaattaaaataaaattaaaataaaagcacaatgttcgatatgtcaatactaattttgggtttctaagtcaataatcaaaatagtcattgttagagtgtctttgttggtcatcaagttgttgttgctggttatctggtggttgatcattgttttgttgttgttagggatggcaaaacgggtctggcccggcgggccagcccgtttggcccacgaaaaaaatgggctgggttgaagttttgaacccacaatgattaaacgggccgggccaacccggcccataaaaatgcaggccaaaaccgggcccgggccgggccagcccggtgggctagcagcccacaatgctaagtcacttacaaagctgtgagacgtgagtggtgagtgcacttcctaaggctttagtgaataatataataataaattagatagatatatattgtgtggctgagagagagtgaaagtgagagagctgagacatgggactcgtgagagactgagagtgagacctcagacctgagattagtgagtctgagagagaagagagtgagaggctttcgttccgccttccgtccgagcttctgccaacctggttgcttcatcatcgttgtcgagcttcgcggtgggcggtggttaccgttctcgttctctttcgtcaacctcggcctcggcggcagtgaccgttgtcgttctcgtgtcggcctctatgtgccttttccctttgaccctttctcactctctactaaggtacgaaaactggaacctctatgtgccttctccttgtgtgttcctcgacctcgaaccccttttactcaatctcctttattctcacttttcaatccaaaatcgtttactgcaactgattttagggttgccctttttctcatttttcttcattttttatttttcctttgttaattttgatattaatatttagggtttcgtttccctttatcagagtctctctgttggtgatcgcgatagagtgttggaactttttctcaggctgttgcggtggaagattcgatgattaactgattatgctattaatgtttttacttgaaatgagtaaatttgattttcatttcggttatgaagttgtgtcatgtgatggattatggattagtgggggaattggttctgttatgtttttggattttgtctccttgcttaagtttcaattgctgttgttattcctctatgtgttgattccattttcatgtgatatgcctaataacataaggacataatgctgtttgtttctgaatttcttgaaagggagtaagacttcatgtgatatgctctattttctttcggttgttatttatgtcaacgactcttgttggttgctttgtaattttcatagttcaagattgctgttatctgtgatgtgtcttgtagcttttgggtagaaaatactgatcaaacaaagtaattgcattttaatgtataattagaatgtgaatgcatctctgttattagaatgacaagatatattaaataagcatatgttataacttataatgaaattagtgttataaaactataaaaggttgatgaaggagtatgattgctgcagtattagaagtatcagccattaatgttttgcttttacgcaaggtgctgcaatatctctttagtttatagatgtatcagctggttgcattgcttctattaagcatatttttatattaaaagcattgttataaccaattaatgattgtaggtttatgtttatctattttgcccacttttatatcagattttcctgatttggagcatatagatgccttataaaaattgtgcacgtgtaaaatcaatattatttggacaaaattgtgtactttaaataaaaatttataggctggaactcttttttttctatttttttttaatttttaagtgggctggtgggctggcccgctagcccactaacccactataaagtggtatgggccaggattctcagcccactttgtaaaagtgggccagcccggcccggtccgttttttatgtggggtgggccagcccggcccatttggggtgggttggcccactttgccatccctagttgttgttggtcatgtaattgatcattgtgttggtgttgttgctggtcgggctgctgctgctgcatgatgttgcacgcttctagaggtagaaactaaagtacaactgattgaaatactcgcatttattcctttaatagacacaacgcctcctttgattgacgcaactcctcatttgattgacaaagctcctcctttatttgattaatttctgctgaatgattcacatgactagaagatccttgcaagtgttgcatgaatgtgtcatctccacatttataagtatgagcaagatctccagtaccgtaaagacgtcccttatgcataggtccagttgttgcaacccaacaccgagtcctaagtctttgttcttcagcagggtctaaaggagtctaaaggagtcatttcagattcaccaacacttgattgaacatcaaacctagcttgagataaattgtttccatagatcaagttatgattgttatacaagaactattaacatagtacattaattttattgtgttgtattagtggaaaggcaaacactattatacatgtctgttgtgtcaattatttacaatttgggctattccacctgctgaagaaaacaaagaaatgggggcaactcacacttgcaacaagcaaggttgagagtgaaaaattaataattgcaatccaaacatgtgtgcaaacaaataaacacattccgatcacgttgaaagtgaaaacataattaaaaactaacctctagccattgcaagctccaatgtccatagaccttagacagctttggcttttctaaaccttcacttactcaatgtgatggtattttattttctgaaggagcagtaggcttagtgagtatgactagaaacaatgagcaaggcttcttatatagaactctactcatcatggagttcaaactgtgaagaggttagtgggaaccataaaatctgcacatgatctcattcataatgttagtattgatgttgggttgaatatagcttataaatggagcacatacggtaacaaccttaacataaccgtttccactctctcaaaatgaaaacataaaaggatatggtccctaaaatatagggaactgccaacattctcccttttggtccatttatcccattatcaatcataaaagaaactaaatatacgaatcatggtgataggtcctctaataatgagtattatctcctatgtatcacaatataagtctctcaacactagctcttaacataatgaaaaaaaccacatgtttattctaggtcaaaactaaatgacatttctaaaaatgaataaatatgtacacaaaataaatgagaaaatatcaaattgaataagagtttcatcaaaacaataaatgcacatacaatgaatatcacatcatggaaccaagtctcattcttactacatgatccttaaaattattcggtggcatgcctttagttaaaggatcaacaatcatcaacttagtgttaacattttcaatgaccactttattttctttaacatgttctcttatatatgactaaatatttaatgtcgatatgcttacttcgatttccactcttgttgttcttagccataaataccacaacaacattgtcacaatacaactttaatgaactagaaataaattctacaagtctaagcacgaatataaactcttccatcatacaacatgcgaggtagcctcaaaacaagaaatgaactcagcctccatagtggaagtagtagtcaaggactgctttgcacttctctaagatacaacttcaccagctaacaaaaaaacataaccataagtatatcttctgggattaatgcaacaagcaaagtttgaattagagtagataatcacctccaaatatcatcaattcacatatacatgagcatgtagtgctttgttccttgaagatatttcattacgttctttgtagctttctagcggtcaatacccgaattactctaatatcttccctaaactccaacaacaaatgcaatattaggtctagtgtaaacctgagcatacataaagcttccaacagctagcatatggaatatttttcatgtgattccactcaaactcattttttaggcattgacttaattcatatctatcacccttcacaatgggagctacactcaatgaaagttttttcatgtaaaacctctctaaaactttgtttatataggtcttttaagacaaatccaaaatgcctcgagatctttctgtatggatcttaatgcatataacataagatacctcactcatatccttcatatcaaagttctttgagataaactgtttcaccttatatagcatactcatatcattagccacaaacaaaatatcatccacatataaaataagaaaacaaatcttactcccgctaaccttttggtatatacattgatccatggcattctcttcataatcaaatgaagagataacatcatgaaattttaaataccattggtgaaaagcttgtttcattccatatatggatttattaagcttgcagattaagtgttgcattagagaagaatccttcaggttgttccatgtaaacctcttcctctagatcaccattaaggaacttttttttacatcaatttgatgtaactcagagtcgaaatgagctactaatgacataacaactcgaagagaatctttcttaggtacgggagaaaatgtttctctataatcaattaattctctttgagtgaaccctttggcaacaagtcttgtcttatgtctctgaatgtttccttttgagtctttctttgttttaaagacccatctacatccaatggcttttatgcaatcaggcaactcgatgagatcctaaactcgatgctatagatgccacaaatactattccttagaactcatggctagtgaaaatgcatcaggatcattttcagctccaatgttatagtctgattcttgcagatacactacataatcacttggaattgctaatcttttgactctagtagatcttcttaatattgctatattatcttgttgaggaacgtgtttctcatcaacaacttgatctacataatcatctttagcaaattgtcgaacttcaattactagttgtctaacaccctattgaacttgaggggtgtgaatgactaccaatctatcacttaatccagaaggttgatcctcataatgatccttttcaaaagcaatgccttgaaatcaattactcccagtaattaagtcattttcaagaaattttgcatttcttgattccacaatcctagtattgtgagatggaccatatagcctacaacccttagaattttcagcatatccaatgaaatacccactaatagtcttatggtctagtttcttttcttgtgagttataaatcatcacttcagactgtaataccttgaatcttaagcatgtaattaaccctgtgattaaggccataatcatgtgttaattattcgaaagagagcagttagcagaaaaccctgtatgggttgcggcgctgagggcgccaggtctggcgctgatggcgccagagcactggagtgtggtgccaagagcgccaggtccacgctgagggcgccgtggtctctgggaagtggcgccaggagcgccagaggtggcgcctggggcgccaagtttcccaggtggcgcggagagcgccagaagtggcgccggtggcgccagggtttctggaaggtggcgccaggttcgcgctgggagcgcggggtcactggaggttcacgccatgggcaccaggtgtggcgtcaggggcgccatgtttccagctggcgcggatcgcgccagaggttctggaacgtggcgctgagagctccagatgcggcgctgatggcgccggagtttctggagcacggcgctgggagcgccgggccggcgccaggggcgccgcgggtcgagctgagtgactatttaaagcccaaaacacgaaaattgaaggggaaaaggtcttcttcttcttcatttcgccctagactccattgctaaccatctcaagcttccttgagccatatttcttgaccaaaacaccttccttcggctcttgattgtgagagaaacactatggaagcttgaatcactcatcctttctcatcaaaaaccccttttgagtgattttgaaatccccaaagaaaaacttgagaacttgagtgtggctgagacccattatgtgggaaggacaccggagctcgaggaggtggtcctagggtcgtcttggacgccgttgaggtaagaaactcaagtttctccgtttgattttgagattaggggtttgcatgaatattgactcttttgtaatggggttggaattagcccaaagtcttgtagagacttgtgttcagggggttgttgtgatgatgttagagccttcagaaatcattattgatgaagtttgattttggttctgagacatgcatgtatagagaaaggggctgagtgcatggttatgttgaaccctagagtagatgataaagtactcttgatcggacggtcatgatgatgatggattgtaattttaattttgtttaagtattttgtagctatgagatgcttctttttcataatttaaaaatgaatcgtgaaaaggaaatagaggcataaatatttcaatagaaaaatcataattacaattatatataatatttaattaaatttggattgaatgacaaattaagtttggattaaaagaaaattagtggtacaacaccaatgaaagcacgagaacccaaaagacaaaaatttaaaagtgataaataatatttaatttgaattgtaatattaactagcttgcttgggttatgcattttattaaaatttttatgatgatggaacttattatatgattggacaatatttagtggtgtataattattttagttttacttacaccaaataattgtaagtataagactttgaagttatacctacaccaaccaaattaatgtagatacaagttttatgaagtttcatataaatcatgtagtcgtaggtatatgttttttagaatttttcctacactaagtttttgtcgataataatctttttgagttctacctacactaatcaatcgtggccacaaattttatgcaattttacctacacaaaatagttgtaggtagaagttatttttagttttaatgaatttatctacacaaaataatggtaggtacaagttgttgagttttacctacattattcaattgtaggtagaagtattttttagttttacctacaccaactcatgaatgtaggtaaaaggtgtctgtaggcataaatcaatcttcttgtagtgcaagtatcatttgcaagagatcatgctcatgagtttccttctggcgatgttttatgagctttgatatctttgagtttatctctttctccaatctccacatctgtctattgcttttgtttggcatgtatctaaacagattatgatatcatttgtcacattatagcatcgctaataagaacaagaacataatatgcaaatatatggtaaaagatgcataccgaaatccaggaattccagcatgtatcttggacaatagtttttgaagatctctaagctttgagaatatttcttttccttcaatgtaattgctaccaaaacaagttcttgaaattatgtcagcagacaaacttcgcagatctttgtcgattttaatctctgatactgcttcaccactttcaagtctagcctcccaagaccttagtgttatatttgttgcgtccactatcagattaaccattgcctttaacatgatttacagcaaaagcaaattatgagattgcaattctaaggtagcaaaactgaaattatttagctctcttgaagattacttttagactagttttcaaggtaaaaatacttcaaaatactttattgagttaagggtcttgctagcggacactgatttaaggaattaaaaaaggaaaaccttttattgaaataatctaggagcgcatttaaaaatcataaggggtgcatttttacacctctcaataaaaaaattctctttttacttccttaaccaatatccttaagacactgattggcagtgccttaactcaattacaatttgacaccttcaaggaacaatttgtatggacaagccaccttcaaggaccaaaccaacataagttgtcacttttgaggacaaatattatattttttggtcttgaatcaaagatcaagggtgtcttccaacccactaagtcagagactaatcccactcgcatgtgtgactaccactgactctatggtattttgcacacaatgaaaatagaacacggatttgtccactaaatagatcgttttcactcatgtaaacataatgaaccttacaccattgttccaaccctttggattagacaaattttatattaactccacatctaattcttctctatggccaatgtagcattccatttctcttgagcagtgtaggttggggtacaataataaactcaccttcaccttatcagggtatagttcaggggcaattatcttcctctaatgagcccaaatttgcccatttgctgacagtataccttggcccaagagtggtcccagatctttggacaaataagtaggcttccctaaatccaaagaggtatacatgatgatttccttcaccatctctatatctgtcaccattagccactgtatagtcccagtagaaaacaagtatatgggacttgcataaatcaaattgaaatcaaaatttggacttaaaatggacggcaatgaagtcatgtcaacctacttgaattttatgattatcattttcatatcagcacttcttgcaaagtatcattctacacattattataaacaaaattacaactagggaaaatatattaacttttttatattataattgagaacttgattctttgtgcatgaaattaagaatgcaataagtgaacagaccaaatcaaaaccatgtggccgacacaggcctttggaacaagtgaaactattctgactttggcatctgggaagtaaaatacattgttatggaatcagaaaatgatttctatcaactttatcagatcaagaacagaaatgagttcataatgttagagtttttatatacttaatgatctaatcattttcacaaataatattagatcaatgcagaatgaaatagaatataaatacctccagccattgctccttgtattaggttgtaatactacaatgtgaagtgattttttgagtcttccaaactcttctctcaatttgcactggatggtgtatatgcactttatatgtgagtgagttcaaggaccccagaaattgaagatacacacctatatatagagcttttccatcaaaggtgtttttgtgtgtatggttatgatgggaagttaacagcggttgagataagagtagttaactataggaatagttatgactatccatacgaatagttatgactacccataaggaatagttatgactatccatacgaatagttatgactacccataaggaatagttatgactacccataggtatagttaaccaattaaggttggttacaaaataaaaccaacacataatacatcactaattacaaactcaactcattctttcagctttcaacgtgctcaaccatagattaaccaataaactcaaaatataaaagagctctaaaagtgaaacaaaaacaccaagtttatgcttatattttgaatgttttaatttttataaccaaattcttgctggaaaactcaaactgtaaaagataaagactatcctggtttcaaagaaagaagactatactttgattcagctctatatgcttttgttacttcacttctatcagaataggagtttcacttgattatccacacaataaaggtttccattaaatgtcaaagtagattaccgaagtgaaactccaattctgattagagaatagttacaaaagtacctatagaattatttatgttgtgtccttcaaaaaattctgccacaattgcagccgcaagataaaagttttttgacttagcgcgactgtaatttgtggtgcatcagctgcattttcccacactttcccacattgtcaaagattaacagctagcaaccgcgaccacaatagaaaaccatggtgagtattgattcatatttctaaacaaaaatgaaggaaggaaacatgatgtttataagacaagacaagaaaagtaactgaccatattggttgatccacttttgaatgtgagggaagagagtaaaaggccatttgtgagaaagagaaacatgttgatctttatctttgacttgagtggttggagctgactgaacttgaagcaaaagggtcttcatttctggaatgttgccaaagtagaagtgaggtgaaggaccatgaatcccttgcctatgaagctttcctctcagtgatcttggccttaacaccaaaacattgacgacatgcatcaacaacaccaaaaccattcccagcacaactttcatggtgctcatctccatcatcactaccctcttctcctctccatgcaactttattttccacaacaaaatctgtgtgtttcaattgtatgtttactatagtttattcccaccgtgctatgcacggtattcattttattttcaatttcaattctaatgatacataggaaatactaaaaagattaaaatgcaagcgtgaaaagaattttgtataagacaaaaaaaaatacaataaatattatatttaagattacataaaaaggacatgaaaaaaatattaacgtaaaacaaatcattattaaaagaaattcacattgttttgttcaaggttttttattatacatacacattggagaaaaagtttaatacttcaattaaataaaagaatggcatctacgttcacaacctaagtcaggatagtgcaatatcctcggcaataattttcaatttgggcatagataaagagtgttaatagttctatttgaaaagagatgttctatacttgagaaaaagtggttaaaaaaaagagtgcgtatttataaattaatatttatagaaatctcatatgcttaaaaacacttttattctcttttatcaaacatggaaaacttttatttccacaattatgttttgatgttaaaatattttctatatcaatcgataacttaatggcaaaaaagaaattaaattattttaagtttaaattttttagtctactatttcatcatttcttatctcatttttattttttaaagagtaaatatctattttggttattgaaaatatgagacagattgatttttacaagataaaaaatttatatttaatttccaaatgtgaaagagtacaatatgttggtcttgtcttcaaatttatgaaattgatttatcattaaattataatatttaagtatcaaattgagttacaaaattcaggaactaatttattattaaattatcattaagattaatctatcatattttttatatatttaaaaattaatttaaaatttttcatcgatcaatttataatcccactattacataagttacatccaaaagtaaaaagacggaataaatatattctttgtcccaacatatccatgcatcttgggattcattccacggttacatcatatttgtgaaggagatttagggtgggtgttaattattggaaatcttctcatattcttttttattcttacgggaaaaaaattgtatgtaaataattcaaattaagtaaccatgcatgaattatcctctaccataatcctctcatcaacgctttttatttattactccccaaaattttctacaaagctgtataatatttgtcttcctctgcagcaccgccaactaacaccatagggaataattgccattgtttccgtataacacccaagcagagaatacaatgacagatgtagcttctacaaatcaccgcctacccacaccctattcccacaccctcggcccacctcacaccaaatactccttccaatcttaaatatatatatatatatatatatatatatataaaatctcatgctaactaaacaataaacttaaaaagtttaattaattatatttaattatatcgatttcaataatcatttattaacttatttttattaaaatttaatattaaaaataagaaaaaatcattaaaattaacatctcaattaaataaaaggtattttaaaaataataactaaataaaataaaattaattaagagaatatattgtattaaaattttaaaagactattttagtattaaacaaaatttgtggattttaaaaattatataagaatattattatttatcaaatttttttataagatatttatgatactttgaatattaatgaatttatattataagaatttaaatgatttaaaagatctttataaatttataagatttgtaaggattatgtaaattttttaaaacacattcaaaattataagagttgatgaaaataataataagaaatgataaggtttagataaataaaagtaaatccaatataatttttttaaccttttaatagttatattgattataacttcatactcttctatattaaccttttttgtaatagtattttttcattctcacttttcgatttgaataatagatttaaaattatatgttattttttgtaattactataattatttcatgataaatctaatgacatgttaaaatgggatgcactaataagcatattactagaagggattggtaggaggataaatgagtaatgtgggtgacaaattaagagaaacaatcacaaaaatattacatccatcaagtgatggacataatcaatataaaaaaaatatggttagtcttagcataagacaaacattaatttaatttaaaataaaaagggcaatgggatgagtatatttgacattttttatttcaaatgaataggagaaatatattagacacatgcatcttgaagaatattaaagagagaagagagtatgtgtgatgagagaaaaaaaagtatgataataatagaatcaggaagaaaaaaatctagtaaaatctcaagaatttggatgagattgtttgataaatattttatgttaaaaagtacgatgaaattcgttaaaatccttcttgaaaaataatctatcaaaatttatatatttttaaatatcaaaaaactttttataagttaaaaagaatcttaattaaatactactagaatttgttgtattcgttaaaaaatcttaaaagtcttaattaaatgatacaagacttatttatactatttaaaaatcctcgctgaatactataagatttatttatattatttaaaaattcttattaaatattataagacttttttattaaaaaaatcttttaaaatcttttgaaatcccaattcaaatacaccccttaagatttacttgtatttaatataaaaaagtatttattttttcattttatacttaagaagaggaagagagtatcttcataaattgtaggtggtggtaaccctcaaaaatccaatgaccaccaccaacccaccgaatatagttccacctgataagtgccatttatgcttgcacatgacacttgtgctcccacgttcccaccatggtaatttacatggtcgccatgcagtggtgaggctggcaattccactcataatgagagagaaacaaaatacttccagtttgtttgatagccataaccaggattaaaaacaaataactggtcaacatagatccattaccttcttattgaagatgattccattcctcgatcggctcccaaatggaccacatgcactggagcacaccaaaccgcggtatacgctgatcgcccactcttaccatatcgtccacattgatgaatgatgaagtaaatatcaggttgacaatgttggaccattaatttgtaccgctagccacttgtaaatgcttgctcaaacagagtatgcaaaatgacaagtgaaaaggcaatgtacaagagattcctcttccctgccacaaaatacacattcatatcgtggacttttttaccaaaatggttacttttgcaaaactatttactagtatggatgttttaaaaaactatttaattatagggtgatttttcccaactaggatttaagaagtgtcacttttagtggtattttgtgtttttcgttcgtcctacagcatgaggtgttattttgattgactcctttttttcggtattttgtccatataggaggtcccactctggtacagttcatccctagctataaaataagtatttagcatcaatctttttaattactagatcttatgtgaccattttcaagtaactcccaatatagcagcgaaagcaagatgcataggtggatcaactcattaagctcccattgaactaagctccacacaaggaaaagtaattgtcattcattaaaatatcgatgtttagtttaattattcttactttttggtgttggtttcactatttttatatttttactaaattttaaataaaaatagagatattttttatatttatttagagaaagcaagaaaagattatcttaaatgaaataagttctaagtaatttttgtgtttatttgttattttcattttcaaattatatgtgtgtatttatatgtgtgtgtggagcatgatcgatgataaaacttcataaaatcctaaaatcaagaaataagattaaaaaatggtttttttttttatataaaatcctaataacaatgtttaagtttaaaatggaaatataaaataaataaaatatcataaaattttcttttaaaagaatcaaagaaaaatgtacaaaattgttaagaatttgttgtatctcataaaacatgtttagtgacgacttttcatttttaaagtcgactttcgtagatgctaaattcctgacaataataaatcatataagggtggtgcctactatgtctacacaaagaaaactatttacgctaaaatcccatattggtaaatagttttgcaaaattactcattttgattataaaaaaaataaaaaaatcatatcctgttgcatctatcgccatttccctcctcctaagtttgtcctttgtgggcagtctatttttgaaggttctctacataaaaatcaatacagttgaaggtatgcatgtcccgcacaatttcttgtacaagatattgtcaccccaaccaaactaccacgtaatagttgatacgctaaatgtacagaataatcacctgagttatccacaagccataccaacttatcaacctcaccctcctttggaacttgtaaattaatatcaatcatgaagtttttcattattggtaatttccatgcaaatcactgtctcctccattctagcttgccctcccacctcccatccgaccaactcccacctcctttacaagtttttgttgttgcaaagaattaagataaatacgactaaatttattcttaagactttgctcaccaacccaaacatgatcccataacgagactatgttgcctctcccaacacgccacttcacaccactatcaaaccacaaacccgcattcttttcactacatgctcccaccaattccctccaccacattaaatccattttagaattcctattcctccctcacatgcactcacaccatatctagctaccaacactttcctccatagcccctcctagtcatgattgattcgccaccgtcattttcctagtaatgcttcattgaatattttagatcactaatttccaacccaccttccccttttggcctacataccaactcccacttaacccagttaatttttttcctctcctcacaccacccataggaactccctctggatactcgctaacctcctgataacacccttaaggaccctttaaaaaaaaaaaaaggaggtaaagaataaagaatagatttgactagtagaggtggcaaaatgggcctgacccagcgggccatcccatttggtccaccagaaaaagtggactgggttaagattttgaactcacgctgactaaatgggccgggccaactcgacccacaaaaatccaggccaaatctgggccaggaacggaccagcccatcgggtcaacagtccaccagtgagtttgtctgagagtgagtatgatatattaaaatttaaaaatagtaaaatattgaaaagatgttcttgttgaattgagtggctgagagtgagtcagtgagagagactgagaagtgaagtcactgaagtgaggtgagagtctgagagtgagagactcagagataggtagagtcgcagagatgagagagcttccagcttcatcttcgacctgagtcacctgacaacctctacacggcttcgtcttcgtcaatcgtcttcaacctcgtcacaggttcacaacatcacctcgttcgttcgttcttcgacctcggtagtgaccatgaatgactcggcggtgttactacggcgtcaacctcgttcgttcgtccattcttctccgtcgttctccgttcaccagatcaaggtttgtaacaactcctccttgatgctgaatagtactctgtgtgtgtgtgtgtgtgtgtgtgtgtgtgtgtgtgtgtgtgtaagtgtgttgtgacttgtgagtgtctcagttgaaagagatgtattctttgtgtgtgtgttgtgacctcgttcgtaggatagagatgcaaaattgcaaatgccatgaagaaaactagaagctgataggctctttcaagtttcactagtcttcaacaataaaagggaaaactagtttttacacggtccatgcttgccttttttcatgattgtgtaaattgtttccatgattattctgttaacacttgaacatgtacagatatttttcagtctttcctgataattggtttgaaagtttcttgttattaatattcctccttgcttatcgggttttcgaaaatgatttgtcctagttggtttgaaactttcaaaccaattattaggaaagactaaaaaagatctgtacatgttcaggtgttaacagaagaatcatggaaacaatttacataatcatgaaaaaaaggcatgcatgacagtgtaaaacctagttttcccctttattgttgaagactagtgaaacttgaaagagcctattagcttctagttttcttcatggcatttgcaattttgcatctctatcctacgaacgaggtcacaacacacacacacaaagaacacatctctttcaactgagacactcacaagtcacaggtcacaacacacttacacacacaaagtactatttagcatcatggaggagctattgcaaaccttgatttggtgaatggtgaatggagaacgacggacggacggacgaggtcgatgctgcagtcacgatcaccgtcgaacgaacgaggtgacatcgtgagccggtgatgaggtcgaagaaaattgatgaagacgaagccgtgtagaggtcattaggtaactcaagtcgaagaggaagctggaagctctctcatctctgcgactctgcctctctcactctcatactcttacctcacttctcagcctctctcactgcctcactctcagccactcaattcaacaataatatcttttcaatattttactattttaatatatcagactcactcaacagtggactttggcccagtgagctgacccagatttgacccgcatatttgtgggtcagtcagtatgagttcaaaatctcagcccaacttactttattggtgggtcaaatgggctgacccgtcgggtcagactcattttaccacccctaacccaaccaccaaaggatagagtacgatacttctacaaggccatttaactcctggactttgacacaatagtagcccaagtagctagctggaaatgttttcattgttaaaccatccaatcattagccttttgttttacttttatatatattttttacttaatcatgtcaaatatcacattttttaaatttaatcctcattttagagagaataaatacaaaagttgtaatatttaaaaacaattaaattagagatttatgatgtttaattaaagggacgaaatagaaaacaaaatgtatattttaaaaaaaatctaatagaggatcaataaaaagttaatttgataattttttttataaagagacgtgttatatatctctaaaagtcactaattaatttaagctttcttcagcattctctcacgctcagtgggcaacccagaaaaaatgaccacccactcaatccatcatgctagtcttctaaaattgtatgctccatgtccttttttaatggttttttttttcttaaattagtttttaaaaataaaataatcatcaaatccatatattgtcatcatagctttaaagaattagtctcatggtcaggacgagaatgcagaactttgttaaggggaattggaattttttttttctttttgtgatccagaacacacaataattatataaaaaaaaaaaatctgaagcattagcaggatgtgtgcacaaaaatattaaaagaaagtagacacaagaagtggaataaaaagtatattgtttactaatgtgtataatgatgtaattctggttttatatatataaagagagagcagaaactagttaataaaaaatatataagaccaatttacttgatatgattgccacaaaataaaattaccactataaaaaaaagttatttccgacggtcgaaatccattggaaatatcaaaaatctgtcggaaattcgatatttccgatggattttcgacggaaaaaaatccgtcagaaaaacggtcgttggaaatttgaccgacggattttgtgtccatcggaaatttccgacggaaatgaccgtcggaaattactgacggaatatttccgtcgaaaattttcgacggccgtttccgtgggtaatttccaacggccatttccgtcggtaatttccgacggactattccgtcggcaatttccgtgggtaatttcagacggccatttccgtcgataattttcgacggccagtttcgtcggtaatttccgactgcctaatccgtcagtaatttccgacggccaattccgtcggaaattttcgacggccatttccgtcggtaatttccgacggccatttccgtcggtaatttccgacggccatttccgtcggtaatttctgacggcattttcgtccaaaattacgtaccgcttattccgttggtaatttccgtacattttgtgcaattattgatattaaataagataattatgaaattaaagcatattataaaatgaaaaactgaatttatacattaaaagcaaaatgtttaaacaaagtaaaataagttccaaatataaataaaataaaaccacactgtttaacatataataactgataaactgttttaaagtcaataattaacatagtcattgtcatcctgtccttgctggtcatttgctggttcatcattgttttgttgctgcgcatcatgtgattgatcatgttgttggtgttgttcttcggcgagttgttgctgctgctgcataatgctgcgagcttctggaggtagaaattgaagtacaactgattgaaaaactcgcatttgttccgttgattgacgcaacgcctcttttgattgacgcagctcctcctttgattgacgcagctcctcctttatttgattaatttccgctgcttcataggaatggctagatgacccatgcaggttttgcacaaatgtctcatctccacgtttataagaatgagcaagatcgccagtaccgtaaagacgtcccttgcgcataggtccagctgctgcaatccaacactgactccttagtctttgttcttcagcaggagacaatggagtcatttcagaatcaccaacactagattgaacatcagacctagcttgagataatctagcctcaaaattttcctgtcattgaaaaacagttattatttcatgagatgaataaaacataatgttttaatacgaaaaccatgacaaattagcatctcacatgtgtctgcttagatctatcatcgacaaattcaccagtatccttccgtaaatgtgtttgttgaaaaatctcatcaatgtatgctgatcgaccaagttcctgagactaataagaaaaataacaacacaaatataacattaccacattgtatggtggaaaaaaatttaacatgcatatttgtaaaatcatcttaccaatcgaattgcatgatcctgcaagctaatagaaccacctgtgtgcatacagccacccttttcagatgctcgattttttttgccttttcacacttggaacgatactcgggtgcattccaatgtgataatagatcattccagacacgatctccaatccaatatggccttttattttcatttcgggcatcgcaaaacatttcagaaagcctatgagaggcttttgagtgaaatacttttttaatttcactctcttcctctggtctccaaaccaatttcctctaagataacacaaagttataatattaaatataaatacataaagaccaatctcatcacacaaaatattggtgaaagacaaccattttactattacttccaacgataaccacaaatgtatttaacaacaacaacaacagagagaagaaaagaaaaaatattaccacaagtgactattagtaaatgtacaaaatatacacataaaaacaataatcattcaacaaaagaaaatgtgtagaaaatgtgggaaaacttttgcagtcaaaggggattggaggactgatgagaagaagtgtggcaagttgtggtattgcatttgtggctcagacttcaagcacaagagattagttaaggatcatattaggtcttttgtaaagggacataaccctcatcctccctttgaaacctttgaggatgacaaggaatgcattactactggctctgatgaagatgaagttaatggtcatcatacatggtctaacaacattctatagctttcctttattatgaagatatggcatagtagaacaaatgtatttaacaataaccacaaatgtatttgacaacaataaccacaaataaccccaaatgtatttaacaacaacaataaccttctatgtattttctttaactattacttccaacaataaccacaaatgtattttatttgtacaacaagagtattatgaagataatattctttattaaaaagatatggcatagtaaaagaaatgtatttcacaatatccacaaatgtatttaacaacaataaccacaaataaccacaaatgtatttaacaacagccacaaatgtattttctctacaatgacttccaacaataaccacaaatgtatttaacaacaacaacaacaacaatagaacacaatttaaaccataaaaagataggagatcgttacgccattgaaattagtaagaatgcaacattatattaccttaaaacgttggaaaaacagttcttgatggttttttggaattgctccccaagttggccatgggtgatcaaattgttgtctaatggacaatgtgatagcctttgccacaacctttgatggatgaaaacttaagacaacaaataatttgttaatgtgtatgtccataaataataaatggtcatgatatatttagaatttatgtatattgttaatacgtacactccatttttcagttaaattgtcggatgatcattgataggtgggtcgtccatggccaaatttgctagatcttcatcagaaggtgtgtttgcagcacctggggtaggagatgttgtgtctgtaggcattgtggatggtccagcagcattaattggaatagatggtatagcttcattcgaaggtggagatggtgtaggtaaaaaatctaatgatcttattggcatagatacactagacgaggatgatgtagacgacggcaaattatctctaggtggtaatagtctaagcacatatcgttttttctttccacctatctgattgtcaatgttatcattgatcggtggtcggggaggatcaacaccacctgatgacatatctatatgtacaaaaaagtgatatgggcattaaagtatgtgaccattaactatttttacccaactggcatattttccttttacacaaaaaatcaaagacattaacaaagttccattccattacaataaaacaataaatgtttcataagtcgggaagataaatatttaacatgtctttaactacttgctggcattccctctctgctgtttcagatcgtacatatatgctttcaatgttagctttttccccagtacagtctacacactctataccatattcaagtgtttcaacagccatacaattatctaaagtcggaacacaaattcttactatgtctctaaatactttatcacaatccctaattgtcatctctcatcattgattccatctcccaaattcggtagataaatctttaacatttgtctaattactttctggcattccctctctgcagtctctgatcttacaaacataggtttaactttgtctaaatcaaaagagtcttcaactatgttaacatccgttgagtcctctaaatcaaaagagtcttcaactctctctaaatgtaaagagtcttcaactctctgaacactcatactgtcctgcaaatctaacgagtcttcaactctgttaacatccatatagtcatttacatctaaagagtcttgaactatctcaacatccatggagtcctctacatctaaagagtcttcaactatctgaacatccatggagtcctctacatctatgttaacatccatggatgcctccatatctaaagagtcttttactctctcagcatccatatagtttggtcaatgtaatccaaaatcaactttgtaatcattaatacagtcttaaactatgtctacaatgaaaaactattgaagtctgttacgataatggaatataatatttacttggcttagctttcataatcattcattataaattcagctgtaatatatgactcaacttggtatataacatccaaattgtgttaaccaacacatacatacatacatacatacatgattcaacttggtatataatgaccgtatgatgaagatgataacattcaacattagcagtgcaagcatgtaatcatgaacagatataacaaaaaaacctgtgtgtacacaaaaaaggtggttcatcttaaatttctttacaagtaattaggggcggtgttttacactgattgcagaagttaaataaggattcataacatcaatccatttgtaatcctattcagaatcataaacctcaaaatcatcttctaatttgccttcattttcttcttcaatattatttgtctgtccatgcaaagtatttgattggggatcatttatgaagacatcatctgggtccacttcttcaaccccacctctctgatcttgcaagccagaaatgttttcaacttcgatgatttcattaccatgtgacatttcctctacttgataaggcacattagttggtgcattgttatgttctatgtaacccctgggctttgtttttattgcaacacaccaatcacgtttgtccggtcttattgctggataggacacataatacacttgtctgacattctgggcactaatgaatggatcaaatcgattgtatcttctatccattcgaatttccattgttccatcttttggatccactcttgttcccctgctggatggatcaaaccattcacaataaaacaaaacaacttgcttagcataacttgtactgttatattgtacctcatatatatgtttaatgatcccataaatcatctgctcctccctctgtaaccccttgacataaaccccactatttattgtttttttgccctcagtccaacattgagtatgaaatttgtatccattgacaaagtacgtgtgccattctttaacgtaactcataggaccatacgataaatcctttaagtgttggtttgtgacatttataccagaatttaccacctacatatagaataacaatcaacaatttttttcacaatacaatacaataattaactgattaataacatacatgttcatgaaaccatcttggaaaatccgcatggacattacgagtatatccatttggttcagtaatctgttgggtttgtacaaatgaactgtccatatgcaaatatacatatggcgcgttaggcttccattggacaacaaccataagtacaaatttatttgaagaaaagtatgtcaacttactcaaggtatggcctaatttcggcacagtttatcaggacatgaacatgggctgagtttttttcttcatcagtcaaccagtgtatgacctccttcacagaagcccgaccttgttggtcaaacactgataacattcagggacgaggatcacttcccattgtactttgattcctaatgttgcgtgacgacaacataaagttatggaaataatgggaacaaaattgggttgtctcatgatgtaagtaagacgcgcaaatcgatccttcgacccttgccctatttttcacagctcgtttacaatcacccatgaatctacaacatttgcataagatatcagtcaccactgtacattattgatttgacattttaagtcatacacaacaataaatttgttacctttcaaatggatacatccatctatattggactggtccgccaagtctagcttcgtatgccaaatgaactgccaaatgctccatcgaatcgaaaaaaccagggggagatattctctccaacttgcacaatatcaaagacatattttgttccattctacgcagatcatcctccaacaaagttgaagaacacaaatctttgaagaaatgacttacttcactaattggattcaagacatgtggtggcaaagagctaaaagcaacaggcagtaaacactgcatgaatacatgacaatcatgacttttcatcccatgcatggtgcccttggcaacattggcacatctagccaagttagaacaataaccatctggcattcttagttcttttatccaatgacatactaactttgtttggtctgttgttagagtgtaatttgcttttggctttaaaaatttgccgttagcccccagcttcatctccaagtctctccgcctacagtacaaagccagatccaacctagctttctcattgtcttttgtcttgccactgacattcatgatagtgttgaagatgttgtcaaaattttttttttcaatgtgcataacatcaagattgtgtcgcaacaaattatctttccaatagggaagatcccaaaagatgcttcttttagtccaatgatgccactccccatatccagatactgttggtggaggtaaacctgtgtcggtgacttttggtacatccctaaccctccgccaaacttgtctaggtgtcaacagacgtggtgggtcatcagtttccatttcccctttctttaatgcatttttgtttcttctaaatgcaggatcaggtggtaagaacctacgatgacaatcaaaccaagaagttttccccccatttgccaactggaaggcctttgtgtcctccatgcaatacggacatgccaatctatcgtgggtcccccaaccagaaagcatgccatatgcaggaaaatcattaatggtccacatcaaagcggccttcatcatgaaatttgtacttcttgaaacatcataagtcacaacaccatcccacaatgttttcaaatcatcaatcaaaggttgtaaataaacatcaatcccaacggttggattacatggccctggtaccaaacaagtcaaaaacatatacggtttagtcatacatagttcgggtggaagattatacggggttacaatgattggccaacacgaatacggtgtagctaatgcttgaatatatgggttaaatccatctgtgcataaaccaagttgaacattgcgtggatcactagcaaagtctccatgtacccgatcaaagtgcttccaagcttcaccatcagagggatgacgtaatgtccccgaactatttctattgtcatggtgccatgtcatctggctagcagtttgcttcgatgcaaacattctctgcaaccttggtattataggcaagtagaacatcgcctttactggaattgatttgttattatttgatcccagactactaacacgatatctaggcttgttacaaaatttgcattcagttaatgccccatcatctttataatataacatgcaaccatcgacacaacaatcaatcctcttagcctccaatctcaacttagatattaacctctttgcatcataaaagcttttaggcaaacgttcttttataggtgtcacatccaaaagcatttttgaaataaactctaagcattggtctggaacattccaattggatttgcaggctaaaagtcttgcggatattgataattttgagtcgaatgccccttcgtacaaggggtgattcgcatccaacaataaattgtaaaatctttgtgtatcttcattcggaggctcttccatgttatttgagtttggaagctcaaatgtctctgcctgtctgagagcatcgcacaccatgtcttgcataaacacaaaatcttcaagttcacccacatttgatgtggtatttgatgcatcaatgttaccatgctcgtcattgaaacgagcatgtgacatgggttcaccatgatcagtccaaacccaataattaggcctaaacccatatttgtataaatggactttgacaactctatcctcgaaaatcctagtactatcacatttaacacaaggacatctgatccccccatcattgtggtaacattgctgttggctagctttgttcacaaactcatcaacccctctaacaaaagactctttcagaccatttctacgactataacatctatcatacatccaaagtcgattggaaggaatatagttcatgttctgtgcattatgacaaaaaataagaactttcataaatcacaaaaatgtcacaatttgtcaaagtaatggtaatcatgttttacgtaaagtcaaacattacacacataatgtttgctttcatcaatgaacaagttatgataaataaatgacattaagacaaccataaatatcaataacacatgcatgatatgtaaacaattaatattgcaataacgttctcctgtaaaataggaatgttcagactccataatcagtcattatagctgtgaattgtatgacaaagtttgacaagttgttgtcgaaaaagtacctgcatatgatagttagtgataacggttgaggatcccacacacctatgtattgctgtttccgttgctccacgaaactatgtcatcaaacatatcataattatatacaacgtatacagtcaccccaatgtagttgttctcacaacctagggggcgttgttgtcatgaccaaagtaaacaatattttctagttaaataggaaacgattgtcgacagaaacattactgatgcctttcataaatataacaaccatacttatatagtacatgatcaaatatattaattagccatctaacaagtccaaccttcctggtatgcattcagtgggaaaggctcaaccaaatgaataatgcaaaatgcattattcagggtatcattgtatagtaagttaggtaagtatatagtaagttattataaaactatatgcgaaaacccaaaattaattttttaacataacatgaaacacacacttagttttcatgcttctgtgtcgtcaatatccatattgaaaaacctttccaacatttaagtctaaaaattatccttcaaattatacttaaacccagtccataataatatccttccatagaatcgatctatcattgtggcaactttatagctctcatattgtcacgtgcaaatctaatgaatattgtagtgttttctatttcagaagtgaggaaaatctcacatcaaagtttggcagcatctcctcctgttagtattcatgtttggagctttagttagttagatgtctacctcatttctagtctcattatataaggttttagcaagtatcaattcctatttttagtgattgaaggagacaaacattcaatgacagacccataaatcagcatggcattacatgagaaagctagtagtgtagacacttatgacaaatgggtattttcctgggcaaaacctaacctcactcgcactccccaaaaccctctctgttgaactttgaaatgacccctctcttgacccgtcaacctcacaaacccccaaactggccaaaagttgtaccactctcagcagaagtttggctatccactatggttttaatgtttttttgctggtttaaatacaagaaaacaccaacttaaatcatatgttaattatgaactaaatcaaacatacctttgtcaaatgtatatcacagcttcaaaatggatacccatatgaaaagcaacctctgagcctctccaccagtggtcactgaaaaacagatgaatacttaaaacaaccaagaggggtgggggtgaattggttgaaaaactttgcccaattaaaatttatatcaaagtagccacaggatctttatcacttattagaaattcttttgataccagaaatcaattttcagattcaaaacaaatctttaaaaccaaaatcagtcttcaatcaatcttccccttccaagagcactagaaaacagagtatctcaaactgtgctttgaatatgattcacaaacaatgcaataagcatataaaactgagaaaattaaagaacacacagattttatactggttcacctcaaacactatgaggctacatccagttcttcactctaaaccagagagaagttccactattgcaaaatattctttacaggcaattacaaatctctctttgtcaaccctagacaaagttcagcaatctaaaacactattagatccttagagacacccctttcaacctgagaactctacccagttgaaaaacccagagaaacactatctctatgcttgaaagaaacccaatacaatagatttacaagatttcactgttacaattaaattgtaaaacccaatcactaagcaagaaaagatatcacctgataatccattgatgatcgaaaatgaatgaattacagatgaaaatgcagatgatcaaaccacttatatgcagcttttcttgactttgattgaaagaagaaacttcaacacatgatcttcatgagtaattgattctatgaagcttctacaatgtttctttctcagatttttatcactaatgaaagcattgattgtttgtgaatgaatactcaacgaaaatctctaaagcacttgataattctcttctttttaatttctgtcgtagtgacttctatttataacagaatttttaccaaaaataatcgattaatttagctcctgtaatcgattatttcgactatgtaatcgattaattcaagattgtaatcgattaaaatacttatggctcgttcaagacttcaagaacgaatagtttaatcgattaaacatatacgtaatcgattaagccagtaagacatattttttttttatttagctcaattaatctatttcgatttcctgtaatcgattaaaactgaatgacagtttttaccaaaacatatatgtaatcgattacaatatttggtaatcgattaagccagtcattactactttctcattcttgcctaagtaatcgattaaactgatgtgtagtcgattacaatgctcatggcttgtattcagaaggcttctaagaacaaaataatcgatgtcactaatctggtaatcgattatttctttgaaaaatgatttttccaaaaacttaagcctttttaatcttcctaaattgattttcttgattaacctcattaatcttataattctatatgaatgactaatgaatgatatgcatgcttggattatcagatcatatattttctatttatacaatcaatttgactcactaaggattcacatccttgatcattacttagcttcctttgattcttccatcctttgcatgttgaaagcacaaaacactcatccatgatcttcattgatgctttgcttcatctgaatcaacagtcaccaccttcacatggacaagggttcttcacaaaggtttaagcttagggcaaaagtgggtaagggtgatgagtcactatttatcactaattacttatctttttgtactcattttaatccctaacttgtgcttaattgtttatattttgcattgtttctcatttaagatttaattagaccaataattcggattttaattaatttggattattttaagtttaattattctaatttttatttacagggcagtttaataattaattgaacttggagttaatttatggacttgaagattagtgcgccacgtcagcatcagcttaatatttcccatatcaaattatagatttcatttttatttatgctgaatattttccatatcagattatggattttgtttttattttttattttatctttagggatttcgtttttatttaggcttaatattttccatatcagaatatggatttcgtttttattttattttatcttatcttatctttagtgattttgggctaaaactgttaggaaaagtccattcttttaggttagacagttactatatatttaggggttctgtgcccatggaaacacacccctctagactcactacattctacacaattttagttcagtttccctttagttttaatattttttgttttctgcttctttatttttagagtttacgtttcctatttttccagaatacaattacgtttttaattcagttttattttcgtttctgttccttctaatttctaatttcgttttctgcaatttcttgttcttctatttcgctttctgcttcttctatttcgttttcattttctgttcttaagattgtttaatattcagttttgtttcaatttacgtttctgttgttaaattcaatttaatggaaggctaaacctagggttggaccctaggacagattgcagacctttaatggaggttcttgttcttctaatttgttttctgcttgttcttccttgttatagttttgttctgtatttttcgaattggagtcatgcttaatgattctgaggttgattaattcagtaatctcagtttgcttaattctgagaaacttgccctaacgaggttcacgtttgcttaattcgtgtaatgacgttttagattaatcttcgcttagttgattaatctggactgataagaattaagtagaacaatttatctttcgtgaaccaaggaaattagaggcgcaatctgtcctaagggtctgacttgtttttaatcattgcaattaattattatttctgtttaattttatatattctgccaaattccttcaaaaaccccccaacacgttttcaatcccttaaacatcgacaattgatccttgagagacgacctaggagtcactttcctagtactacacttaattcataataatttgacggagtacgaccttcgatcaaattttggcgccgttgccggggatcatcagttctgttaaagggttttgtttttgtgtgcgtgtgtttttatttttgtttttgtgttcgtttaaaaaaaaaaataataagaaaaaaaattttattctgtgtttctcttttgttttgtgttctgttattataaaaaaaaaaaaaaaatttcgaattgtgcgtgtgcctttctcctatatcagttcctatttttgtggtttgttataaactatgcttcaatttttcatatcttgcatattgtaattagggtattgaggaagcaagccgcaggaagccagccgcagccgcgcatactaggaggaagcgtagtcgcaaggagtagcgtgaatagtaacctagtttttgaattaattgcgatttttcgttttgatagttagacttgttatttttccgtgaatttttttttggtaacttcttttagcttatatttgttaggaaaaataccaaaaacatttaaagtactacagattctgagatacgaaaatttgggactcaatttttttatcaaaacttaaaatggtcataactttcaatccgaccgtcagaatttgaagtattatacatgtttttggggtagaaaaaaaagatctacccagcccagcacgctatgcttgctggccaccgtcggatcttcaaaaagaggctgttttctaatttatttttatttttgaagttttattttcctatttttccatatttgcttaatctgttttatttagttatcctttgaattaggtcttgaaatttggtatgctgtcttttcatgattttagggtgttgctcacaaaattttaactcatttggacttcgtttgagtataggtctagttctacctctctttgttcttatctgccaattgcttgatatgctgcatattgtgcatgatgtaacgccccaatttactaatcagggtcattactaaccacacatcataaacaagcagttaatcaatcagagttgaagcagtttggaagcataaactagaagtgacagcatcaaagtcactatcataacactgtacatcataatatggtgaatatacatcatagtttcactgtacaatacaaaactgtacaatcatcccatcagggtgcatcaaagtacataaccaaaacatatgagcaacatgctcaagtcctctatcatagtgtgtccttcagcagctaatcctgcacaggcttcttgccttgggacctctctgctgctctggaagaatcacctgcaaaacatagccccacacaaggggtgagatataaaatctcagtaaactcagggcccttgaaggtatttccttcccctggttcactgacaacagatgcacagacagaatcatcatcaacacataaacaatcaatgtacaaccatctgtcaatatccacatgattccgatggtcatcaccatctatcacctatcatcatcctgcggaggctatcacctagacatatatgccgatccaactcacagaggatccaatatatactaggccatctcatggcaggacgtcactatccatcatcaccatcctgcggaggctatcatctatgtatatatgccgatccaacttacagaggatccaatatacactagaccatctcatggcaggacgtatcagaggcacctccgaaaatatataggtacaaccacgtctggaggactcctatataccgggccaacctctatcatgagctacaactcatatctcaatacaattcgcctgaggaggcttcttccgtgaatataggaccatctcactaaggaggctatctctatatcacagaaaacatctcatgtcaggcctatctcaatcacatgtcatctatcctattatcataggatttcacaatcaatcgtgcatatatttagctaaacaaccatagctatgcaccacaatcgcccatcactgggtccaaatcagattataacatcataaatcaaatcacaaccattaccaactcatatggcaccatcatccatcatcagtcaatcagactacataagcataaccaaaccatcacccctttaggagtgtggtggaacacagcaaaggaaccacaagcaagaaccaagagcttacctgctctggaaaagtcaccggctctcccggtcctgtggtcaacaccacctgagctatcaagctcacgtcctacataagaatacaaacacaacacatcagatacggtcctaaaccgtttgaacgaaaggaactccctttcttcccataatcacaacacaatcactgtctaagtgatcatccgaccctcaacaggatccctcttagcctatacaaggctacagagcctccacaaaagctctgatcaactatggccaagcatatctctgcttacaatggcctaaattcaacctctcataatgatcagtttcaaccgatcaaactcatctatctaacctcatgagcaactttgtcaactgctctaaggtccagactagtcaaatagtcgaccttttccatctgcatatacagactcagagccaaaatcaaacttcatcaataatgatgattcaaggctctaactccctcagaatagtcctctgagcataagactctacagagtccgagcctaataacggctctaacacctccaaaaacacccctcaagataaccccaaaaccccgaaatccaatacacagaaccaccagttagagctcgagtttcttacctctgtggcgttcagaaacaccagggaatagctttccctaagatgattcgcccaatcacggcctctttcgctttcaaactccgagctcccaagggttctctcagggaaatccaatctcactatttctcaccttttctcgagaatcaatcggggtatcttacttatctcgaggttttgatcacttttccagttgggtctaaggtgtttagatgagctatggagaagatacgaagctctcaaactcgtcaatggaggttcccactcttttcctttctttttcccttctctctcagcccaaatggcccttttataggcctctgccgcgactcccacgcctcaagcgtggactcccacgccccaggcgtggcgttccagccaaaatttcacttctgggcaacttcccacgcctcaggcgtggctcccacgcctcaagcgtggacctccagcaagaatttggctttctgggctgtttcccacgccccaggcgtggactcccacgcctcaggcgtggaacttcagaaaactcataaatcagtttatttcatctttttctcaagcctttctcttagggattctcaagtatcactataaacctttatcttaggcttaatctaagcttaattatatgcttaaaattcaagatattacacatgactagaggcaatccaggagacttgcaaccctttgatcctgagatagataggacctaccatagattaattaggcattctaggcaattttccttagattctgtagcattagatactgttagtttgaattctgagtattcttcttctgagcatcctgtgcataatatttctgattctaattctgattttgctaattatttttatactgagaataatatggctcaacctccacctcgtgagaggactcttagggagctggctgcacctgaatttacttatgaaagcttgtgcattcagtatcctgatgaggatgttccatatgttctcaaaactggactaatacatttgctgcccaagtttcatggtcttgcaggagagtgtccacataagcatctgaaggaattccatatagtctgttcaacaatgaaacctccagatgtccatgaagaccatattttcctaaaggcatttccacattcattggagggagtggccaaggattggctgtactaccttgctcctagatccattactggttgggatgatcttaaaagaatgtttttagagaaatttttccctgcatctaggaccacagccataagaaaagatatttctggaatcaggcagcttagtggagaaagtttatacgaatactgggagagatttaaaaagttgtgtgcaagctgtccacaccatcagatttctgaacaactccttctccaatatttttatgaaggacttaacaacatggagaggagtatgattgatgctgccagtggtggagcacttggtgatatgacacctgcagaagctaggcatttgatagaaaagatggcttctaactcccagcagttcagtgcaaggaatgatgctattgctattcgtggagttcatgatgtagctgcgcattctagttcttcttcatctacagctacgaaattagagggcaaattagacgctttggtgaatttagtgactcaacttgctattaaccaaaagtccacctctgttgccagagtttgcgatgtctgcacttccaatgatcattatactgatgcatgtccctctctgcaacagcaacctgttggccctgatgctcctcaagcttattctgcaaacatttataataatagacctcaacaacagcagcataattatgacctgtccagtaacagataatctggggtggagaaatcatccaaatctcagatggtctaatactcagcaacaacaaccacctccagtaccaccatttcaaagttctgctggcccaactagaccatatgtgcctccaccagtccaacagcagtaccagaggcaacaacaagatgttcctgttccaccagcccctcaaccttctacttctgaaccttcattggaggagctagtgagacagatgactttgcaaaatttacaattccagcaagagactagagcttccatccagagtctgaccaatcagatggggcagatggccactcaacttaatcaggcacagtcacagaattcagatagacttccctctcagactgtgcagaatccaaaaaatgtgagtgccatcacattgaggtcgggaaaacagattgacatacctaccacaataaccgcacctccatccataccagttcctatacctgcacctgtaccaacacatgagcaaaaggatgaccaaattcgtgcagatgaaccttcttctagcattagttttgatgtgcagcagcagcagacttctatccctcttccattccctcctagatcaattccaagcaaaaagatggaagaggtggataaggagatactggaaatcttcaagaaagtagaggtcaacatacctctgcttgatgccattaagcatatcctgaaatatgctaaattcctgaaagagctgtgcaccaacaagaggaagaggaagatgactggaattgagagagtcagcatgggcagaaatgtttcttccatgacaggtaattctgttccaaacttgcctgaaaaatgtgaggacccaggtacttttagcataccctgtattattggtagtaataaatttgataaagctatgcttgatttgggtgcctccataaatgttatgcctctgtccatttttaaatctatgtctcttggtcctttgcttcatacagtcaccaccttcacatggacaagggttcttcacaaaggtttaagcttagggcaaaagtgggtaagggtttgagaaaatagagggaaaagggaaagttgctgaggaatgagctctctctcacgtcactttcatttttccacacttaaatgaatgccacctcacttttccgccacttaagggtgtgaaatttcaaaaatcagggttccacgctaaccgcgtgaaaacccacgatgatggcaccatcttgtgcagtggccactctgtctgcacgatttcacgcgatcggcgctgcatgtcacgctagtagcgtcatctgttcaagacaattgcacagcttcgagctacccacgcgaatagcatgacaatagacgccatcagtgtgagtaactcgaatccaaagctccttaagtcaaacatccacacgtatggccccgtctacaacacgactagcgccactcgttcgagctaattagcctgcaatgaactaaccacgctatttgcatcgtcctccacgccatcagcgtcaagacttcgaagcctcagcctttcagtcatagctcatgcggttcgcgcggtaaatgacgctggcagcgttgatcattcgaggcaaatggtctgctttgaggcaaccacgctggtagcgcttgggcccacgccatacgcgccatcatttcgatcctcaaccccttcatctgccattgacacgggtcgcgctatatgtcatgccagcagcgtcacttggtcgccccatttggtctaatatgagtattccacgctattagcgtcaaaaccgacgccatcagcgtcagtatgtcgaatactcagtcccttcagtaacaaggcacgccaatggcgccatatatgatgctattagcgtcaaatgttcgagccatatggcctgctctgaggtatccacgctgtcagcgtcatagatgacgcgatcggcgctgatagggcgagaaagcctgaacggtttgtatattttaaagaaaccctattttaaagaaaactgaaagggtcacatactgtccatgttcccaaaaccgctgtgactgtacccatttccttcaatcaccaccataaccgtccccaatcatctgcaaggctcggttcattatacatatatctcaacatttagtctaattcactgcaaaggttcattccaaggttgaagttgcattcacattcaatggcaggcgacaaggtaagctttattgaacgaccctatattgcataataagcctgaagtttaggttaggaaaataaccgtacactagtaaaatggctatctcacgcgagtagcggcaccgctatgtcgaatttgctctgttttgttaatgggcattttgcatgttttaagattgggaactattcattgcaaggcttggttcagttgaaatcttagtatttggttgcatgataaatacactctgttgtttgacatgattgtcactattagattgatttaaatctgggaatgttgattgtgctgttttattcaatgtctaacaaaaactagtagtgatactaaacacatggagttgaagtggttgacagttagataagttgtgaaaataatgtcatagtggttgagaaaatggaatcaaactccatactccaggtatagagtccaaccagactcacacccataactgcattgtgaagccaatgcattcatcttctttgcttctcaaaggaatgaaatctaaaatgagttggttatacacactacttattctggtttctactttgaaggagtgtccaatttatcatgaagagagagtaagggtaaaaagagagagttaaagttggattaaacactcacatattactaggtattattaactgcgtggcaacatggcaatctagttttggtttcgggtgaacaccagccaagttggataaagtgttggagaaaaccaagagaattgaactcaaatcctagactagttttgtcctgactctcttccttaccatatgtgcaaagtcccagttggggtacatgtaaatgtaaaaagagagaaagaaatccacaacagcacaacacccttcacatgctagacagcgatgcactgtgtaccctcttaacaaaaccgggtacacgtccatttccccttccacactgtatggacacctatcccttgagcagtaatgcctctctctctgtgtctgcacacattatatgtcccaatttgagagaagattactactactgtctactaagatacatgattagcaaagggtgcatggtgtttgtagttaagaacagtattaattaaagtggtccatatagcttaagcttaaaaatgggtttgatttagtaatctggtttagtgttcaaatgtggaaagaaaatatatgctgttctggacataaacaacatacattaattatttagcatccttgtgccccattttcctttaataatgcgaatgttggttctgagtcattttgagtctgatgagttgaagctagatttgttgggttgtccatgattccatgagtagcatgatctaaatacttgtgaacaatgccttggattgactgaagttgatatacttggtgatagtctggtatatatgtatgttggttgctgtgcttgaattagtgaaacatgattgaatctctcatagttcattaccgtgaatatgaagtatgacaaagtataagttagatgtttgataacttaaggattttaactgattttaatctgggaatcttgattgggctcttaatgggttgtaatagtgcaaatgttggttatgagtcattttgagtctgatgagttgaagctagatttgttgggttatccatgattccatgagtagcattatctaaatacttgtgaacaatgcatgtaagtaattagatttggggatttactgtgtttttgacatacatacatgttcatggaacaataaaagctgtcatgatcaggtgttaatgtcatcatcgaagtgaattgcgagaacaagttctgctacatccattgaacacagcacactcattgatccataaaaattttaagttgttgaaagaaataatggaaaacaaatgtgcttgcaatcataattaggactgccatcaatacatatagctgattcttgcacttaactcactagcaaactaaaccatgttgttattttcgttgtttaacactaattggtatccattgatacaaactacacaaaactgggaattgttaggaatgttcaagcccgttgaaaaatttgaattgatgcttgcataaattagtttggttgtgtttggtttgccacatgtatctaaatttaacatccatatagtccaagtcagcactcatcaacttgaatcatgaatgtatattggattttttctgagtttcagggtaaacagattgcgaaagggaagaagaaaagcacagccacatctggcaccaaacgagcccgggtttctggatatgacgaatctcgtttccgcaaccatgagtgtgaagagaaatttgagacatggtacttgccaaagaaaataatccccgaaaaataatcttaagggaaacccttccagaaggcaaccctatcttagaggtcattgtaaggcgtcagtggcacaagctagttagcttcgctgagcctagttcaagcttaattcttaaggagtttctagccaacgttgacccatctaccatcgatatgaggagagtcagctgggtcagaggagtacaggtgtcgtttgatgagaagaccatcgagagatttctggataccagctatgatccgtttgacaggtgtgagtttagccacctattcttgaggatgcagcctaacatcttgaccaagatgtaccgggatgacgtaccccagctagccaccaccatcaggcatgcaattacaggcttatatacagcctggaagaccaaacccagcttagattacattccagacaagatggagaaaaatgacttagtaggagatgcagctttttggcaccaatttgtgaaccgcacagtgattccatccactaatatgactgatgtcaacgtggaacgcgctgtcctgctatatatactccggggtgaaggtaatttgcacattgcaaacattttatctaaccgcattgttcacatgattcaggacgctagcagtaagtcgtggctagcccactcatctttgatctctcacctgtgtcgagaagcgggtgttgagatcctagatgaagagccgatggatgttccaattgcttctctgatgggccacaagacttacttagatgctatgaagaacgccacagaagaacagatactcagagcttcgaagctcaccctagagcaacgtgctgcaaggagtcctcgtgctaaaccccaactggaagacactcagccacaggaacctgcagaaccttcttcttccactgagacggcacccagacatgagcctttgtacgaagactcaccgagctatttagcccttcaggccttcatccatagccagctagattatcagacacgcatgttagagaatctctgcaggcagtgcggcgtcatgacaagttcctaccaggcaccagtaattccaccaccacctcctactccagctggagccccagatactacagaggcagccacagccattcccgatccatctcagactgttgaggctgacgatgagacgagacagggcgaggagtgaggagtgatcgtcacatcatttgactttcttgtttttagtataaggtttatatcgtacgtttacattttgaaactaatatatttcactacttcatgcatatatactactgttttatgattaaattgttgtgatcatgctcagtttcgattaatgttccatttgagttgcgatttcacaaataatcttgattgataaaaaatttcagtaccgctatgaccttgttagtaataattataatagtaaaaatttggtcctatgaatatttattttttactttcctaagtttcagtcaagtttcattgtagttcaatttaaaggttagaaacatatttataaatttacatattttttgttatatttttcattatctttaacttaaacaataaatgaacaattttaaaattattattttgtatgtttcgtatgtcaaaatgttggccgaaaattatttaattggttaagtattataaaaatgagggttgtgagaaaaattatgatatagggaaacatttcaaataattaaacgtttgttataatcccatattaatttatttaaacagttttaagtacacaaaaaaatgtttaaaacacaatatatttactaaccttaaccaaagttgtatgacaaaattgtttatactttaatggcctttatgcaaacccattaaagaagattaaataaaataaactaaaccaagttcaaagttcggaaagtaaggaaaaaaattaaatattacataatttatatgatttttcattgggtttaccttaaacaaagaagtaacattttgtagcttgtatgatttttttaaaaataaatcatttgtaaaaaatatttttttacaggctaaattaataaaatattccacaatctaaaaacaattcatactgtatagtcacaattcataaatgaagattaagtcttaccaatgatgtgttcgaagaaggagttatcccccggcggggcgttatcagtcacattcatgtatagtcattcattagacttaatcaaatttaacttacataattatatttaataaaaaatttaattactcacattaatgatatttattaaacaatgtaaaacatgattaaaatgatcataaataatattcatgaatgctattaaataagatatggaaactctatataaagtaatttaaattaattaactttggttgttctataacaaattgttaaactattatatttaataaatatattaattaaatgctattatgtttgttattgtaacaattgaattaaatcaaaagaatttaaaaatttcaaatcttgattacatttagataataaaattataaatatttgtatttttttaaatgttctcactttatttaactgttctttacccattatttatatgataaaaatttaaaaacaaattatatatttaataaaaataaatattgttgattgtttgatatgtaattatgttaaatacttaaaaaaaattcctcgtaagggtttacccatgatggcatagagaataattatttttcataaatgataattgtagtttttatcataaaagatgaaattaaaactaatttatataatgatagagtgagtaagtaatttaaacctttcttgtaacaaatattataaattaattttaatttttatctatatgataaataacaatatttttattaatcatactattgataaaggaatttaaatgaattaattttggttatcatataacaaacaatcaaactattatttttaaataaatatatctaaatatcattacgatttaagaattgaattaaataaaaagacttttaaaattcaaaagcttgattaaatttaaatgaaaaaactataacaaatttatttttaaaaatgtcaccactgttatttacccattattttatattatgaaaatcgaataacaaataatgtaataaaaaaaataaatattgttgatttttttatttgtaaatgtgttaaatgctttttgtaaaaaatcttgttatgaaataagtttgatttttatctctatgatgactaaaataattttattttttatattattgataatttaatttaaattgattaactttagttatcctataacaattaatcaaactattatttttttaaaaatatattaaataaaggttattgtgtttgttatcataacaattgaatcaaataaaaaaaaaaaattccaaaatcttgatggaaaaaaaataactacgctattatttctttattttttgaaaatgccaccactttagtttatggttatttattcattattttatatgatgaaaattgaaaaaaaaaacttaatatattcaataaaaataaatattgttaattatttggtatataattatgttaaatacttttatgaaataactaaagtaataatcaatatgtagacagttgcatcaatgcggttattaacgaacgcatatttattcattattttatatgataaaaattgaaaaataaataatatattcaataaaaaaaatattgttaattgattgatatataattatgttaaatacttatatgaaataactaacgtaataatcaatatgtacacataacggttaaaaacggacgtatattcataatattccagtctaagtctcaattcaactttagtagaaaaaaagtctcaatttcacttatgaaaacagtaaaaagttacttttaaaaaatgtataatggacatgttttacaattttgaagtgatattgttagtcacactttcaaatagcactgtgaccttcttagtcacaaataatgcacacttaatgaaatttttttatgatcgaattgggtacatgattattccttttacttattagatactaatgttaatgtcaataacaaaatattcaataaatttatttacaataatattatacatctttttacatcttacaagtaataaagcaaatgataaaaataataaatatacaaaatatataacattttcctgcaaagtaccgaatttttaaattaaaaaaaatatcaatacagtgtaaattgtttctacgaacaatttttgcgaaaatataatgtggaaaatattttccacataatactctccgactcaccaccaaatttctctcattgaccaaaatatttcaaacaaaatataatccgtcggaaattttatttccgacggaaatatccgtcggaagcgctaaaattaccgacggaattttgtctgtgggtaatttccgacggatatgtccgtcgaaaatttccgacggattaatccgtctgaaattaccgacggaaatatccatcggaaacgctaaaattaccgacggattttgtccgtgggtaatttccgaaggacatatccgtcggaaattacccacggacatatccattggaaattacccacgaaaatatccgtcggaaacgctaaaattaccgacggaattttgtccgtgggtaatttccgacggatatgtccgtcggtaattaccgacggacatatctgttggaaattaccgacggacatatccatcggaaattacccacggaaatatccgtcggaaacgctaaaattaccgacggaattttgttcgtcggaaatttccgacggaaatatccgtcgaaaattgaattattttccacggaataattactgacagccatttccgtcggtaatgtaaatatttccgacaaaatttttccgacggaaaataatccgtcggaaatgctgaaatttccaacggattttggtccgtcggaaaaattccgtcggaaatagcttttatttttgtagtgtacataaccttatataattacataatttttattattacactatcaaaaataactctcaaaattctatattattcatttttattttttaataagggaaaaactagtttatataaaagtggaaagataagccactaataactatcagcctatcaaaacgaagaataaggaaaaacaatgtaactattttctagctaattaacaaaaccaaaaattgtgtaagcaatctaagttacagttaatttaacaataataaagtcccaagagatgggggctactattcgtccctgctcatggcttcccgcggcagggatatcttgttttcaaaaagaaaaataataattatgatctaatttggaaaaataaaaaagacttatcagcatttcctactacatgttttcaacagtcatcaaatgatgtcttaatgtcttatgattatatcaactatctcgtttcctgcatgttttccacattcatttgctacattgtaattgctacattgttgcttaatgtcttatgtttatatcaatcatcttaagaacaactcccttaccaggttctataaccaaacggaaggaaggtgaatggcagtaacttgatgagagagagaagtgaaacttcaacagaatgagagacaaaatcacctgcagttctgtcatggctaggtgttgtccaacacacacacacaagccccgattccgaatggcatataagcttgtggaaccttgcaggctccaagcaccccatttgcaaatctttctggattgcacttgtgagcatcacggccccagagttgagggtcttgctgcagcactgagattggaatctgaatattggttccttttggaattagcatgccttttaaagtaacatcttggagagctagctgttctaacaacaaatgctgctggtgaataaatcctccaagtctcttgaatcaccatgcttaactgcaactaacatttttatagaaggatctcacttgatcagtaagaatgctcatgaaacttggaaataatttagagtctatttggataaacttcttcagaaacacttgtaagagaagaaaataaggaacaatgaataagtttctctgtaagctagaattagcttatacattagtaaaaagtttttggacaagttaatatgagagagcttttacaaatcaacttatgcataagctaattttagcttttggaaaaatttatttcatttttaattcctatttttactcctataagtgcttctgcattagtttatccaaacaagccttattagaattatattaaaatttgagacacaaaataaatgttgaactaaaaaaaatcctctaattaaagaactgctaagtagcatgattaattcatgtctgttccatcctattttcaacactatgcaacacttttttgcatgtactgcccatttaatgccaacaaaatcataagcaagaaaattttatataaaatcctttggacaactgatagatctactatgttatgatgatctctcaacttgtttacttcctcttgtggagattagaatgcaaatgaaatgggaaaaaagtacaatgaattttctccaacttcaaagtcattatatgttattcatgcattgtgtccaatctaaatctctgaattgaaattctattccataccatgttgaagtccaaatccaagaaaactaatatgtttcatggaaacatttagctttagcacatactgtgtacaacataccgttttcaggcttctaagcatacttgcatctggagcactttttccacaaacttcaattaagcaccttggcacgagcacaatcttgccatttttggtgtgcagctcacagcattaagcaccatgaggctgtaattgcagtagtctcatgaccagcacagaatatatttttgtaattatctatcataaacctctcacatgagatggaatctgataataggccatcattacccttggaattctttgcaccctcaagtatcatttgtaaaagatccttctcatgagtttcctcctatcgttgttttatgagctgtgatatctttgagtttatctctttttccaatctccacatctgtctgttgcttttgtttggcaagtatctaaaacagattatggcaccattttgcacattagtaatagtagcatcactaacaagaacaagaaaataacagaagatatggtaaagatgcaagcaaaaggaaaaggctaaaatggaaaacaagcacattatatttctcatcattgatgagcacgaaagtctttctagttagcatgcataccaaaagcctggaattccaacatgaatcttggacaagagtttttgaaaatctctaagctttgagaatatttctttcccttcaatgtaattgcttccaaaacaagctctagcaattatgtaagccaacaaacttggcagatcttcgtcaattttaatctctgaaaccgctccctcactttcaagtctagactcccaagaccttagtgttacatttgttgagtccactatcagattaaccattgccttcaacatgatttacagcaaaagaaaatcatgagattgacattctaatacagtataactgacattttttagcattcttgtagattagttttcaaagtcaaaatacttcaacatacttaatgagataacatacaatttggtccctaaattgacaatttgtgttgctttggtccatgaaagggtaaacctgtcagcaagttgacaattttaaggcttgatttgtattgactttcacttccaaggactaacaacaacaaccaagccttatcccactaggtgaggttagctacatggattacatgataccattcagccacatggagcactttcaacgaccaaagccacataagttgtcactttaaggaaccaaattttaaattaactctgcatttagttcttctgtatgtccaatgcaacattccctttctcttgagcagggtagggtggggtagaatacacttaccttcaccttatcaaggtatagttcaggggcaattatcttcctctggtgagctcaaattggcccactagatgtcaatataccttgccccaagagtgaccccatatctttggacagataagtaggcttcccccagattcaaagaggtgtacaagatgaattccttcacgatctctatatctgacaccattagccactgtataatcccagaagaaaacaagtatatgggacctgcatctatctaattgaaatcaaaatttggacttaaaatggacggcaataaaatcatatcatccctattaattctagaagactaaacttttcatttagtattatcccaacccttttcagcacttcctgcaaagtactattattttctggtttttctttttcattttttggtgtgtgattcatttttaatatgtctttgattatttcaagtgtaatgtgtaaacatgcccttgatacataacattctacccattataaacaaaattaaaactagggtaaatatcctcaagccctgtagccaatagggccttctgaacaagtgaaactattccaaaatttggtatattagcagtaaaatacattgtgatggaatctgaaaaggtttctcctatagaacatttctatcaactttagattaaccaatacagtgttcgtaatagactattactaaactcaaactcaactcaatgttttagccttcaataggctcagtcatagattcaccaataaactctgccccaaaaacaaaaagtcaaacaaaaacatcaagtatgtgctttcattttgcatttagaacattccaactcttataatcaaaatctcactagaaaacttttgaaacataatatttctttgtttaggttcatttgaaaccaaatatcaacttgcaaatagtactgattgctgattcatttctccaaacaaaatgaaggaaacaacatgatgtttatgagactcgccaaagtaacttaccatattggctgatccacttttgaatgtgagggaagagagtgaaaggccatttgtgagaaagagaaacatgttcatctttgtctttgacttgagtggttggtgctgactgaacctgaagcaaaaaggcttcatttctgggatgttcccaaagtagaagtgaggtgaaggaccatgaatcccttgcctatgaagctttactctcagtgatcttggcctcaacaccgaaacattgaaaacatgtatcaacactaccaaaactgccaccaacacaacttgcactgtgttcatctccatcactaccctcttctcttctctcccttttccttctgtttacactaacaaaactacaaaatctcggtgattcaattgtaagactaagattattggttcttaaagtaaagtacacttttgttaacttttctacaatttttgtaaaagaatattgaatactaagaagagtttaacagacgtgtcctttaactacctcaaccaatcaaaaatccttcctaatataatttttaaaataatttatatatctatctatatttatctatacataattttaagtctactccaaaaaataaaaagtttttacagagtatcaacatcacataaaattagaacttgggttaacaaaaactttctaaaaagtttttgttatatatatatatatatatatatatatatatatatatatatatatatatatatatatatatatatatcctcaacactcacttatcggcaaattttgaaaaataatacaaatttttaaactattttgaaatctggggctgacaaatacgcctaatttaggtatgtttgggtgttgtatatggacaaaaaataactttttaccattctactatatcacattctctctctaaaagttttttacccttctctgtggagttttagtagattatttctgcaacgaagctttgccaacaagtaagtgaatttaataattttgaatattatttaatatgttatattattgaattagaaaattgttagagccatatgaaattgttagcaatgtacatgttaggttcgtagaaaattgttagggtgtagggtgtagggtttagggtttagtgttaatggtgtagggtttagggtttagggttgatggtgtaggatttagggtttgaaaatgaaaggaacacttcaaaacaaccaagagggaggagtgaattgattgaaccttggtaaataaaaattttcaaatcagagtttttccaaaggatctttatcactttaaaatgttttgaaatcaataatcatttattcaatcaaattcctctatcaagaaatcaatgagtaatacaaaaatttctgtgcaaacaatttgaatcaccaccaaaacaattgagagatgaagagataagaagaaagattagccactgatttttatactggttcacttcaaacactatgaagctacatccggttcttccactcaacactagagtaaagttccactattgcaaaaatattcttacaagatttacaagcctctctttatcaaccctagataaagttcagaagtctaaaacactattagacccttagagaccaaacccaaactgagaacactactcagcttcccttagagaaacactatctctaatcatgtaagaaaacccatttacagtagactaatctttacataaatcaattaaaagaattacaccttcaaagaccaaggaaaattttcacttgataatccaaagaacatatgcatgtgaatgattcaatcaggttgaaagagaaattacaaactcaatgcattcctttccttatgctttgactcaatgatgatgcttcacttcccaaatcaaaaacccattcgaatttgtgaagcctatgtgatgttagaaactcagaaaccacactaaagaaagctcatgaacgtttgtgattgctcagtatatgaatttctcaaagtcacaaaaaacagagtaagaggtttctatttataactgatttctaactgaaaataatcgattaaacacgctcctgtaatcaattatttcgcatatgtaatcgattaaaccaagaatgtaatcgattaaaatgctcccgatatgttcaggatttcagctatgaacaatgtaatcgattatttcgtgaagtaatcgattaagacagacagacatgtttttcttaatacactatgtaatcgattacaatatttggtaatcgattaagccagtcagtactctattctcaaatgtactatgtaatcgattaaaacgatatgtattcgattaaaccagtagaacatgtaatccataggcatagatgtaatcgattataaattctgtaatcgattaagacagtcagcatgattttcttatttaagcctatgtaatcgattaaatcgatatgtaattgattacaatgttcttgatttgttttccagaaggcacgaagaacaaaataatcgattctatcaatgttgtaatcgattaatgcagtaatacttcatttttccaaacacttagcattttaaatgccttacttgttcattgctcttacttagacctttaatctaacaatcctagatgaatgattatgcatgatatgcttttggattatcagattgcacagctttctttttacatgaatcaaattggtcttcaatagctttctttgacattttccaattaggcatgtagaaagcacaaaaccaccaaagcttgatcctattcattcatgcatggctcctcttgaatcaacaatctccccctttttggctttaaacatgccaaatcttcaatttgattaagctcagatacttggagattaattgaggtttccatttatgaacttcaagcttaaaacctgaaaaatttcaaatgccttttgctaagtaacaagtgttaaagcatatgtgattcatgagacttcaattaagctttatacttttccattaagttcctttttacaccttaactccccctaaaatccagcacatattcaaatcaaattttgggcaaaaaattgaacaaaaaacaggggcaaacagagtacatttgaaatcactcccccttaatcaattctccccctatttggcttgttaaaagtcaaaaacaatataagcacaacggatattgaactggaaatgcataattcattagaattaggtgtcatagggagcattacataataaaaagaaacataatcaacaaaaacagaaatataatagacatgaataaaaaaactaaacacaatctaagcaatcctagaattcaacagaggcattgtcattcatgttggcctcaattgaatccaatctttctctaatttcttctaaggcttcatgagtttcagccttgaagtcttcttggagctttaacatgatgtccatcttttgaataatcaatgattcaaagtcaaagaaggctggctgtgcaggctgttcctcatcttctgaatcaacaaccatttattctccttgtgcagcagctccaacttgattagccatcacctagccattgggtgtcttcctcatacccatcttggtcaaatgtttctctttaatttggctgttggatgagtctgtgttgtctacaacttcattctcaacatcaatgttgaaatgatcaattagcctagagacaaatataggatatgggaaagggtagtttacaagtcttttagacttaagcataatctcttcaataataagcacccagttcataggaatatgatttttcagcccatataccaactgaagatcctcatcagttgcttgggtatggttggttgctctaggggttattacatatgtgattatgtaatgtaagagcctatcctcagcagtcataggacctgtacccagcttagtcctaagcctcatgtgaggattatgaagcatttctctgtaggtgtccattttgctatacccctcaggatcttcatcaaatctcctaacaccctcacacattaccctagccactctttcccaaatttcaggggttacaatcatctctactcccttaaccttggattttatagcccattgcattgaacccttcaagcaagtatagaaaaccttcactaaatcatggtagaaggtacccttcatttctaaaaccttctcagcccttgggcttcaaggtaggctggaaactgaaagccctcccttatgaaccaatcaagttcaagatatttgggagaggccactggtttagtggcattgaattgtaggtagttgaatttgtcactttcagaggaaaaccataagtctaacatattggcaggttggggaggaggtgggttagatgaggattccccagcttttctcttagaagttctagatctcttaggtgttgggtttgacatggttacacagagacagatttgacaaaaccagggcttaagaaaaaactcagaaagtgcagagagagagatagacaaggtgcatattttctatggcttgtaatcctctatttataggcacaaatcagaccctaaacgtccaaaaaattcaaaaatatagttgttggtgacagtttaatgacattgggtgccttttaaaattgattgggcagttaaataacccataaaaacctgtcaggcaacgttcaacaacatgaataatcgattatttcgttaactaatcgattattccagagcaattaggcttctgcaaaacacatggtaatcgattattttattaagtaatccattatttgatcctcagtcagaggttgaagatgaccagtaatcgattattgcttgcagtaatcgattatatgactcactttatgaattatactagtaacagggcataagtaatcgattatcctgagtggtaatcaattattccagtgaaccttatatcttctagtggtgaaggtaatcgattacaaggcttaagtaatcgattatcacagtgagacatgcactcaatcacagaattttaatcagtgtaatcgattatcccgatgtgtaatcgattattctagagataggttaattcttgttatacgaagaataatcgattaccatctgtgtgtaatcgattacataagcacaaatttcatagaggatgtgatttttaatgagattgatcaattaatttgtgctttaatcgattattacagtcaattcaacagatgcagagcattttagcagctttctagaatgttccaaataatcatatgttttgtgcaacataaggctttaattcatcatacaaaatgcatatagaacaagctagaaaatgttactttcatctagaatgcctagcatgttcctaagagtataaaatctatcccttgataatggttttgtgaaaatatcagcaagttggttattggtgtcaatgaattctacctttatgttacctttttgaacctgatcccagaggaaatgatgtctggtctcaatatgctttgtccttgaatgcataattggattctttgatatgtttatagcacttgtattatcacagcaatggaatctcatttagctctacttcatagtcttgcattttttgtttaagccacaagctttgtgcacaacaacttctagctgagatgtattctgctttaacagtagataatgcaacacatgattgttttttgcaatgccatgagattaatgaacttcctagaagatgacaagtgtcacttgttctttttctatctaatttgcaacttgcaaaatcaaaatcagaatatccaacaatattgatagaagcaccttttggataccaaagaccaactctaggtgtagctttgagatatttgagaatccttttgacagcagtaagatgagactccttgggatttgcttgatatcctgcacataagcaaacactaagcattatatcaggtctactagctgttagatagagcaaggatccaatcattcctctgaacttagactcatcaactttctttccactttcatctgaatcaagataagttaatgtagtcatgggagttgcagcatccttgcttttctccatctcaaattttttgattatttcaagacaatatttggattggttgagaaaggttccgttcttcatttgctttatttgaagtcttaggaagaatgttagttcacccatcattgacatctcaaattctttctacatagctgatgaaaaatccttgcacaacaagtgattagtagaaccaaaaattatatcatccacatacacttgaaccaataagaaatcattgtcatgccttttgataaacagagttttatcaacactgccccttgtaaaagattgatcaagcagaaattttcttaacctttcataccattgtctaggagtttgtttcaaaccataaagtgcctttttcaatttaaaacatagtttggatgtttgaaatcagtaaaatcaggagcttgttcaacatatatgtcctcctcaatgtatccactcaaaaacatagtatattttgttttttaacaattcttggaattcaatcttatagtattctaatgtcagttattttgaaaaaaggtttgatgctttaggccgattttgagcacacgagctgctctggtatagcacgagattggaatccctcagtcgggatgaggtacgttttcttatttttaagtgttcttaactatgcatttgtggtccacgttgatacataattgtgtacgactttcttggttcatctgagcagcagcgactgttgtggatggcaattactcctgttatatgcttccacagttgagtattcgcagccggatagatgcatgcgccaatttggaagggatcatccaatcccacgtactcccaggaagctgaagggtatgcatgacctttccttacgcgataaacgagaagataactgggtccgtaagctgagactgtttattaggcactaggaggttagggaccggcacattgaccttccctctctgcttcagggcttcatgtcaccaaaccatgagtacatggtttggtacagcgaaaatgggaagcggtacatctcgaagatggctgccaagagtggtcgtggtgtaagttttgctgacattaaaatttgtctttttatatttattatgctagagaacatgattcacactaatgtttatatattttaatttatagttagatgggctggagatgttgtacttcgcgcttggtcatgagcagtggtcgggttacacccacgagtgaacacaagaagaggtcatcgcataatgtctatcttcaaagagagttgtcgcctggaggaggcagggtcacatgcacccgaatcccagctttaggaggagccacaagtgtctgttggcgttggccgtcgaagacaggagggacatgggctagagcgtcgacggaaacaaatgcaccatgttgctaagcccattgtaggtcccaagcctcgcacccagggtgggtttaggcctccaattgtagcatcgacatacgatagtcaacccttgtattacgagtctagtcagtagggggacatggggtacgagggatttagtacgcaaagtcatatgcctccactggctgactcccagacccagcctgtatatatggaaactgcaatggcgatggcatcagcgaatgttaggagcagtggtgatgtagctcctacaaagtggactggtgctgacattgatgagatgctctctcagcttgattattctgtagcaggttgtgggggttggtcatcagatgtatcatatgccaccccagctgctgagcatccccgacccttgtttctagagcaggccactccatgttcacctctctatgtaggcccttataaggcaggcccttctcagccacagccttctcaggcaaacccttctagccggatcgttctccgccagaccgttctccacgaccgcgtagacagaggctacctgatcgtcaagcgcgtcattatcagtggccaccagagtctttgttttttagccgtttgtgaaacacttttgtataatcttgttacacatgattgaatgaaattatatattatttttgtactttgtccttatatttaaattagattttaatttctatctatgatttatgtataaagtttattttattttaatggcaataaggattaaagcattttattgaacgaacaagcatggttggagggatttgcaaaacaaaatagcgtagggaccactttaggagcatagtaaccttaaaagatttagtcaaaaggccacaagtggtggttctgtgtgtaacaaagaggtacccgtcttttagcgcgaaatgtggattgaaaatcaaaacaaagaaaaaaatagttatagcttgagggaatacaacacaaatataccatattcagagagagagacagagagaactgaagagagaatggcacaggcacaacctgaagagaggatccatcaaaacccagaaaaagaaacccaagaaacagggaattctagcttcaaatttaatgcccaagcacctgaatttgttccaagatcatagacccagatgccagtaattgatatgagaggcaaacagacaaacgacaatgaacaatacttaataaaagatgataacgaaacagacattttaaataacaataacaattgaaaataaccaaacttcataaagctacttaatacaatgaatcattctagtcagcattatggccatgtctcattccatttgggtaactggtttgttaaaaatagctaaaatctctattggactaaaacatttccagtagttggattctgctaacatcttaaacacgtcttcatcccttgtcaactctattatgtgatattcgattgtgtagtctgaatattttgcatgggctagctgtccaaaaaacaattttcttaccacctatgggttgtgaattccataagggggaaccccaataggcgcaacttgttttatgacatccttaagtgtttcaatgttgcatcctgaaggaatttcaaaccttattggatttgttccagtgaaggaataacccacaaaaccgccttgtcgtcctatgttccacttgtcgttgtaatataacattgcatcatgtgtagggacgatggtggatcgaagtaggttgagtataccatcgggtgttctgttgatggtgaataatatttctataggaccaacacttgacatttgatcattgcacattaacattgtgcaaacatcatcatcatcatttgtgagttacagagaatgaaaaaaatattgctgacctgcatgtaggatggctatcggtaatagatttcatcaacaaaatggtcattggttagcagaagggtgtcatgcatcctactcttgagtgtctgaaaagaacactcattaggaactcgcattggtattggagtaggacattgaaaagaaacaccagtttcgttgtttttgattgatccatttggaaaaatgaatgctaatttggagttaccaatggtctgactgcttgtttctcctaagaatgccataggattcagattgaatttcgattgcggaggtatgttgtgtgggagtgggagtgtatggcttatatagggatcaatgacgcccaaatataggcgtgttcagtcacgccctatttgttaggcatgtccagtcacaccctatttgttaggcgtgtttggtatcgccctatttaggtgtgttcagtcacgccctatttaggcgtgttcagtcacgccctatttgttaggcgtgttcagtcatgtcctatttgggcgtgttcagtcatgccctatttgggcggcgagttcagtcacgccttatttgttaggtgtgttcagtcactccctatatagccctcattgactccccataaagcgtaaatgtttcaaacacagccccaaatttattttacaattttatttgagtctcatgttcgggtttagtgtttaatgtgtttggtttaggggttagggtttaggatttagggtttacagtgtttggtttagagttttctcctaaaggtgtttggtttagtgtttagggtttagggtttatggtgtttgttttagggtttagggttaagggttaggatgtttggtttagggattatggtgtcgtctttagggtatagggtgtctagtgtagggtttaggatttatgatttatgatggttggtttagggtttaggatgtcgtctttagggtttagtgtatttggtttagtgtttagggtgtagggtgtctggtttagtgtttagggtttagggtgtttgttttagggtttatgttgtagggtttagggattatggtctcgtctttaaggtttagggtgtttggtttagggtttagggtgtagggtttagggtccatctaatttgttatttagtatccattttgaaaacttgattgtcgtatgtgtaatcacagcaaattccgcatctggcgcttctttgatgtgtttcgacttcgtccatctcgttacgtattctgggggaccttggacgaccatttgcatgcaacatttgcctgtcaggtatgagaactggatcttcactcaatggaatagcacgttcattaccgattggttgccatgacaatgaataagcctgaaccaagttgtttacgaggaagacatcatccacatactgataaggattttggcgaacatgtaaagcagcaactacggtgtgactacatgggtatttgaaggccttaaacttgcaacactgacaaaactgctctgcaaggttaactgaatatgacctttcccagccctcctccacctcaaataatgtttgatcaacattatatgtacgtacatggtgacttgtagcaacggactgattatgcctcttagcatcaaccacatttttgcaatgtcatagtgaatgttgaagctgtgaagcagccgcctgacctctgcatacaaaataatgaaccaatcgggtatatgtgtgcttcacaagaggagtgataggcatgttccttgctcccttgaacaccctattcactaattctgacaagtttgttgtcatatggtcatatcttctcccctctacatcatatgcacgtgtccacttttccttagggatgccatcaatccattctgcaaccttaggactggtatcacgaaatcgtgcaaacgctatgtcaaaatcaaccatagagggagtataacctgcagaataataataccattaacactattccatttacagaaagtcatgagggtcttcttcaatcttgcattcttgaacctttgattaaaattactggcaatatgatgaaggcaaaacacgtgatgcgcaaaaggtggttgtcaaccgacatgattctccacagtagatattatgctccggtgtcgatctgaaatgagacgtatattttgtatttgggtaatgtgtgttgatttaagggggagctacataaagattacatgaagatcaagcaatgtgaagtcttggatgaagttttggctttcaacatgcatgaagctttgaagatgaaagtttgtgattaaatgtaaaaggattgaaagcattctgatgatccaagttttgcatgcatacctttcatacacattttaagcattgcataatataagctttaagtaattaatttgaaacttaagaaaaagctaagtgttttgaaagaaatagtctaaagccggattaatcgattactaccttaaaagaatcgattattttgttcatctagctttctggaaaatcatcatgaacactttaatcgattacctcatcggattaattgattacttgaaaattagcatacttggaaattggctgagtgactggtttaatcgattacaacataatcgtaatcgattacatacttgttttaaaagtatagtcacactgacttaatcgattaccacttcttgaaatcgattatttagttcacctcatgttttgcattcacgctgttttaatcgattaccaataattgtaatcgattatattacacaaacatgatttttgacatggtctggtttaatcaattattatggactgtaattgtttattttacttcaacatgtttttttgctcagtctgttttaatcgattacacgtcgggttaatcgattatttgacccgttaactgaaatcaagaacttaccaagaacgttttaatcgattacaggagcctgtggagcgcttttaatcgattaatttagttacgaatttcagtataaatagaacccttgccttatgtgaaaaaaatagggagagagaattaagtacagatattatattttcgaattctgagcattgaaaaaaaaaagctttctaaggattcacaaaggcattcttctgggttcataaggtcttgcttccattgagtcatctatgggtcactaaggatatagtgaagcaaggcaatctttcacaaagactaaggaaacctgattctgcataactgtttctgcattcatcctgagattttcattattatgcatttcaatcttggatcatcaggtaaattctttccttaatctttgcgggtgtaaagtttttctgttgtaactttgatttggttgattctattgtaagtgggtttttcttgcaagaagagatagtgtttctccaaggacagctgactagtgttctcagtgtgggtgtagcttctaagggtctaatagggttttagatctctgaaccttatctagggttgataaggagaagcttgtaattggttgtaagaatattatttgcaatagtggaaatctactctagtgttgagtagaagataactggatgtagcctcatagtgtttgaggtgaaccagtataaaccttgtgtgtttattcttattctacatgtttgattagttttttagtgaattctgttttacatcatatttcttgaagcattacatgtcttgtattgatattgaataaaggttcttggttgtatttgtgataaagatcctaaagggcaaaaactctgattttgataaattgattttgattactcaaaaagtttttaaattaccaagactaactaattcatcccccctcttggttaagtgtgaagtgttcccatattttacaatgtggaagcgaatgttagcaaggaagtattcccaagcttccaacatttccccctcaacaatggcaaatgtcagtggtaggcattcattatttccatcctaactcgtggtaatcaacaattttcctttatacttgccatataaatgagtcccatcaatttgaatgatgggtttgcaaaatttaaaagcctcgtaacgctgtcttaaagtccaaaaaatgcaatgaaatacacgtttttcccgtaccagtcgatgtgccacaaaataagcatctgtttgaaaataaaaataaaaaagaacctggtgaaaaacaaagcatgtagttgcaccacctgagcaaaataagattcttcccaatccccgtaaatcatttccattgctttttgcttcgcataccaggcctttccatatgaaactttaaatccatgcttattggtaatcctctcttgaaccaatgcaattgacacagacggttcctccttaaccattcctaacaatgaaattgtaacattgacattaacaagtgaagcaataacatcaacatcaatatttttcatatagagcaaatttaatagaaacatacctactacaagtgaagcaataacatcaacatcaagctgtttgtgaccctgtgtaatatgatcattcaggcaattgtgttttccaccccatcttgaaacaagtcaattatcaccgtacattggtttaattactctaaccctcctagggcaaccatcgttgtttcgaacacacttcatgctaaacttgttaggcttgctctcaaccacaattgcttctttatgctccttcatatggttccgcttaattcagtttgtgcatcctttttggatgcaaattcctgttgaacaaacaaatcctcccctaattgccatggatcttgcactaaactcgaacccgaagcataaccagtaaaagattcttcttcgcttggatgattccaatcaatacatgtaatgtggaattccatcccaaaaaggagtgacctcaacacctaaacataccaagcaaataaaatactataatatacaaatatacatatatgattacattttcattgatttcagtcatctaacatactttcaacagcttgttttggtttagtagatccaacatcggcatgatagacaatcccacatcaatatcttcttggaatttagttgcatgcacaccaacatcctcatcattatccgacgcactagcatccacctcaagaagacgatcttccattgcgatattttcatcatcgtcatccatcaccaaggttgggtcatgttcagcttcctcagacatatttacacctggagcaacatatgatgatgcattatgtgtagaattaaaagcgactgaccttatgggtaaaccaacatcctctgctgcagtaaaatccacgtacaattctaaaaaatcattccttgactggttgaaaattcttccattaccatttctatgtcttcatcctccagtagttgaaaccccatgtattgttcatgtttccataatcttatcgtcaccaaagtgatacgttggttgtcttttagacctaatttttgtcgtatcttctcatgcaattcacccagtgttgattttcgattgatacgcgtaggcctgtaatccccttcaaaaacaacactccatcatcctttaactaaccttccattaaaaaatagcacaacacaagcactctcactacctaaactcatttgatgtcgtcaacaaaaataaaaactttaaatatgctatgaagaaatggatcaagaaaataacctgtgcataaatggattaggagatgctatttaaataaaatctgaggggtcaaacatgcccagatttcaaaatagttttcaaacaaccccaaatttcaaattagtttaaaatttgtattacttttcaaaatttgccctcacttatcttaacaaattcctttctaatcttccatttctctctcttgcagcgatgaaagtcacagctggctgacatatcacattgttggttaatggcttcttctattcatcgtttttaaggttccatcttatctttattatttgtttattttctcattgtattaattattcattttattgctaattaatgcccatataatcccttctctgtctcttgacctttcttttctccatcttgcaagcattgaagcgttaaacgatttaaaattaactctatcaaaataaaccacgaacatgctacaagttgtacagttttacagaatagctagaacctagagggataacaaggcagtttcacaaaaataatcctctggttgcaccattgatgcattataaatcctttttatataataactttctttatggtatttgtttcatttaatttaactaagacacataatccccttgcttattttagagaaaatgtaactttagattccaaaacttcatggtttccctttcattttcttccctgaatatgtcaggtagactttttcattagcgataatagatgaatgaatttgtcacacttttttactttcggggactaaaattaaatttctatcttttggaaacgaatttgttaacgctctacaaatttatggatgaaaatgactatttacccgtatatgaattatgataggggtttgatttctctcaatgtgaatagagcaacatttatgggaagaagagctaccccttaattgatactttactttctcgaggattaacttaatggttgtgcatttttgtttgagtctcatattttgggtaagaaattttaaaacaatagacaaactatgcttattaagcaatattatgcttattattatatttgttctaacttatttttgttttcctatttttttaattgttttattataatgttatgtttgcaacaattaaaagaaggggaagatgaagattaaattatattttggataaatagtcattttcgtccttgaatgtgtaaagcgttgacaaatttatccctaaatgtgtcaagtaagctctttcattaacggtaattaggagggttcgcgggtcagttaggattggttttggcaaaatttaggacctaacccaatcaaatttgaccgattcagctcgattcaatttttagattttttttgaaacccaacccaactcattcataaacagtttgatttgattcggttcggaccaatggattatccatttatattttatctttttttatttcttagaactattattttatattatgattcatacaaatatccaatacaatgaacacaatagggtaaatagccatttttgtccctgaatgtgtagagacctgacaaatttgtccttgaaagatggaaattcaaattttagtatctcttttgtttagtggattttgaaaatccttatgtgttagaatcagtcttgtttgagagagaagatgacacttaacaatgtcagatatgcacttaattgattgttgtcctttgagctggtaaaatcatttttaaaagaaactttcttaattacatgttagaacaaaatcaaacgtgttggtgttaaattataggttagaacaaaatcaagtgtgttggtccaatggaagaattaaattatattttatatgttagaacaaaaaaaaagaaagatgaagattaaattatatttaatccttaaatgaaataaaatttggtgtctaacaaatcagtccaatggaaacttattgacattttggttaatggaaacttactaacattttggtctaatctattcagcagttgtgttggcaaccatttttgtgacatttccgtccctctgtgccacgtaagctctttcattaacagtaatagatgaataattttcacactttttcactttcggtgactaaaatttgaatttttatttttcgggaataaatttgttaatattatacacattcagggatgaaaatgactatttatcataacacaatattatcaaatgtttgaaaatagtaaaattgattcatttaatattatcaacataatattctaaaatagactaatacaaattaaaacaaaatattcttcaacgatatttactataatagtctgaatcagaactatttcttacaaactaatttcttgcaataagttttggtacaacaagatttgttgaaacaaatgaacaaaatatgatccattaatattataaacatttgaagttctaacacttggagtccaaatattagaaatatttaaattcaaaccaaacaactctaaaaattttgattgattttgacccatacatgaacatttttaattggatctatagatctaaacctgtgatccaactcatacatgaacggttttaatcaattcaattcgattttgatccaaatacataaatgacccaacccaaattgtttgatcggtttgggttaacccgtacccgtacccatgaacacccctaactgtcactgatgaaacttaacagaagaatagatttattgtactttttccactttcaaagactaaatttaaattttcatctttcgagaatgaatttgttagtgctctacacattcaagaacaaaaataactatttatccttcatatgcttaaagagtacaaaatactagtcacttgtgctacactttgtgtataagagtatggacaactaacgtctaccaaaagaagataatttatctatggttatgagaggaactcggaagaccttgtagttattattacactttatatgaccaaaaatacgcaaataaacttgtcgcaaaaagagaatagaccatgtaaaccatctgatctgggacgcattgtcaaagaaatgctacaagattgctgaaatattcttaccatggagacatcttaaatgaaagggaaaccatgaagttttggcatctaaaactttcagctactcaataatacacaaacaattaagttctattttgcttgtaaagccaatcctctttctcctacactcctagttatcaagaaccggtaaagtttggcacaaaatgtcagccgcttgttcgagctctctatctgttatgatcaatggtgggacaagcctgacaacatttccttttccagcagttaatactaaaaggccagaatttcggcatgcatcaacaaagggtgaggcaggtacatctaaatctattcctatgattagcccaacgccgtgaatttctttcatgtgtcggttttgtcctaacttctgcttgagtagttctttgaagtagagacccttcttagatacagatgacaggaaatcaggttttgatattttatcaaaaacagcaagagcagcactacaaacaagggggtttcctgcaaaagtgcttccatggtcaccataatttatagaagaagcaactctctcagtcactaggagtgctccaatagctaggcctccagcaagaggcttcgcaaggatcatcatatccgggaagacgccaaatgcctcatgtgcccaaagaaaccctgatctacctaaaccacattgaacctacaacatcacagaaagcatattatagttaagtagaataatattactgaccaaatggaggcaaaagaacctaaataatacattttaaataaaaaattaccaatttagggccgttttcaaactatttaccaatctggggcaggaggtcgcacccaaaattgggcatgaccggtcccgccttaatctgggcatgaccaagggggggtcaagcccaattttgggcgtgactaaatccatcgctaaatcggttagcgaccgatttagcgacggaatttttgttttttttattttttttgtttgcaacaaaaattctgtcgcaaaaactgttagcgactgaattaacgacgaaatatatgatttttattttttatttaatattatttatttttatttttatttaatttgaaagtatttttagattgatcttcatgatagatatgatctgttttacttttaataatatttttttatttagtatatttttataattttatatgattttatttaatatattctggattttggtataaataatttttaatatattattttatttaatataatttctaaatttgtatatgattttgtttaatattttttggattttgtatatataactaatttttaatataatattttttatttaataaaatttttcaatcctctaataaacaaattattttcatccctctcatcatctctttcatcctctaataatttgataattctctttttgttccagtcaaaagcacctagtcgactaactcgtcattgaaactacaccgaaactcaggctttctatcaatcggtgactcaattgtgtaaaattagtgtggtcaaaacatatacattcaaccgagaaagggaattagaaaggatcgtccatcttgcatggtgaatgattaattgtgtgagtaagttggtcaccatctttatctctctgggtaagcacaatgcaattctttgcaattcaatttgattaactttgtctcacgcagttctactcctatttctagagttctgcaatgttacaccgctgtgcacattggaattaatggggtgttacaattccgattattgtgtggtgagtgcactttgggatgagtggaacgagtggtaaaacgtggaatgagtgcgaaaaagttagaaatgaatgtgttttgggataaaaaaatccaaaaaatattaaacaaaaccatataaaaatttagagtatcgaaaaagttacaacttttgatagaaatgtccgatcgaggtgtacaatatgtcgaaatgctcgaaattaatagaagtaactagaaaaataaaaaatattagccaattaactgacaaaataattaaaaaattagaaaacaagaaattttttgggatttcgaagattaaatcgcaactttgaggcacttaaaggcctcttttggggaaaatttgcgaccacaagcaataagaccaatgtcctcactgatcacaaaactaatttaaaaaattgaacaaaattgtactgtaaaattgacgatgcatataactttgaacaatcctaatttttcgtagcaatgtccgatggatacatattttatgtcaaaatgctcaaaattaagagaggcaattagacaaataaaaaatagcatgcaattcactaattgaatgaataaaaaattagaaaacaagaaattttttgaaggttcaaagattaaatcataattttgaggcacttagaggcctcttttgggaattttttttggccaagtccccttggggacttgtctaagccttctcctctcaatttcgagcgcgtggccaccgatttcgtctcaatcggacattccagtcaaaagttatgaccgtccgaagtttatatacgcatctgttcacctgtgcatgacacgtggcagaagtaggtcacgcccagaaccaggcgtgactaccccctagtcacgcctggttctgggcgtgaccagtcatgcccagttctaggcgtgaccagttgccccatattggtaaattgtttcgaaacgacaccaaattcgtaattttttatttaatttatatttaattggtttttttaccaccaaatggaataattaaatatatgttataaataaacttcaaaatataacagctatactttgtcactcaatgaaataagaaacttctgtggatttacgagaaggtcatggtactagacaatctcattcctctcaccatcattcaattaatcatgacaaggcatagataaaccaaccaaccatttccagtgacaatgccatcaagagtttaatatattagacaatattttcccaagcatcttaaagcaactgaaaaattatttaaaagtgaaaaccaattttgtgtcttcgcctattaggctgttacataagcaaatttctttttaaatttttttaggaacactaggcatttgcttattaacatacaaatacagttaaatatcaatattagatactcgatacctcatcaaacacaagaagtgacccggcttcatcacaagcattacgcagagacagtagaaattcttttgtagcactgtaaattccaccttctccttggatgggtgttgtaaatagatatattttagattttatcttagctatcatctttagttatctttaattgttatctttagttgatagttattatctttagctattatctttagttatctttatctttagttgatctctttaaatagagacctcttgtattactgtgatacacaattcatatttataaattcctatttttttcaagttggtatcagagctctcgattttgagggctttgcttccgcgcctatcgccttaagtgcgaaacccttattcttgactcttgctgccattagctgccaccgaaaatttttccggggaaccttttggaccgagaggattattgtgggctattttctcttgtgtttttggtttgtgtttggtatggctagttccgacaatggttcttctcaagggaattccttcaacaaaattgctgatggtgcatcttccaaatttaagaaagatgatcgttggtgttcttattgtagaaggtcgggtcatattaaggatctatgttaccgtctccatggaaagcataaagtctatgagaagatggcaaggatgcgtggtcaagttcatgtagtttctcctgacataactactgcaccaaatgaggtccaatctggatcttcagaatttccttctattagtcgagatgagttagaacggctgcggaccatcattgattcgctgagtaagcaatctagttctagtgctttgaccatgaccggtatgagttccactaattattcttttcttacttcttgtactgattttaaacattcttgggtaattgattctggtgctactgatcatatggcttgttgtgttgaatcttttctttcttataaccctactattgctactcatacaatagccataactgatggttcacatacatcagttgcgggatctggtaacattcatttacaacctttctttcacctcaaagatgttcttcatgttcctaaagtctccaccaatctcttttctatcaaaaaaattacaaaagatttaaactgcactgtaaccttctttcctactcactgtgtctttcaggatctcaccacagggaggatggttgggaaagctaaggagcaaggtgggctgtactatttggttccaaagtattttgacaaaggtactaaggatcgcatattactaactcatggccagtgtactacagactcattggtttggttacatcacaagcgcttggggcatcctccatttagtctacttaagtctttatttccgtcattatttttgtccaagtctgttgagtcttttcgttgtgatatttgcgaatttgcaaaacaccatcgtgcatcttttccttctagtactattaagagtgttgaaccctttaatcttattcattctgatgtttggggtccttctaaagttactcatggttctggtaataaatggtttgtttcttttattgatgattgcactcgagtcacttggatttacttaatgcatgaaaaattcgaggtacctcaattattattcaaattttataaaatgattgaaactcaatttgggaaaagaattaaaaggataaggtctgacaatggcactgaatatgtcaatcagcgtctttcttagtttctccaagatcagggtatgattcatgaactcacgtgtgttgacactcctcagcaaaatggatttgctgagagaaagaatcgtcatcttcttgaagttgctcgtgctctcctttttcaaacaaatgtaccaaatcatttttggggagatgccatccttactgcagctttcttaatcaatcgattacccttccgggtccttgacaatataagtcttgttcactctatgacttccttctttccatcagtgtcctccttacaaagtcttcaaccctgagtgtttggatgtgttgcctttgtccatattcacaaacatcatcgcagtaagttggatcctagagctctcaaatgtattttccttggatatgttcctgataagaaaggctaaaagtgttatcatcctgctagtcggaaaacctttgtatctatggatgtcacatttcatgaatctgagtcttttttccctagtcctcatcttcaggggaagagcagttcggtaagttctgagtcatcttctttctttgagtctgaacctttcatgtctacttctgtattttttcccattgtttcgaatccttctatgtctgccccatcgactaatggttcggaaatacgaagaattgatacacctgagttagtatatcacaggagtgagcaaccctcattgcctcctcagcaacctcaatcatctgaacaaacggtaagtcctgaatctcctatttctgaacctaatattagtgtatctgatgagttgtccaaagacttgcatgttgcttctgatgacttacctagtgtttctgataacttgcccatttccttaagaaaagggaagaggtcctgtaccaaaaattcttgttcttcttgtccagcttgtactaaatatcctatctcgtagtttgtctcttcagctaaactttctatgcagcataaaggctttatttcagcactagattcaatctcaattccaaaatcagtagatgaaacattaaaagatgagaagtggactcaagccatgcaagaagagatgaatgccttggagaaaaataacacatgggtagttgttgatagaccaaatggaaagaaagcaataggatgcagatgggtttatactttgaaatacaattttgatggtactcttgaaagatataaggctcggttagttgccaaaggctacactcaaacctatggtattgactatgatgagacttttgctcctgttgcaaaatgaatactgtgagagccctcttatctcttgctacccattacaactaggatatcaatcagtttgatgtgaagaatgcttttcttaatggtgagttagaagaagaagtctatatggaaattccacctggttttggctcgatggatggaaggaataaagtttgcaggtaaaaaaggctttgtatggattgaaacagtctccccgtgcctggtttggaagatttactaaggttatgatagccttaggatacagacagagtcaaggagatcatacactgtttttcaaacatttccaagatgggaagttaattgtactccttgtgtatgttgatgatattattatttcaggtgatgatattgttgaaaagaaccttctacaagcacgactggcctctgaatttaaaataaaagatcttggaagactgaaatatttcctagggattgaggtagctcattcaaaggaaggaatttttgttagccagagaaaatatgttcttgatcttctcaaagaagcagggaaacttgggtgtaaaccctccagtactcccatcgagcagaatcacaagttaggttatgaggaggatagttctccgttgataaaggacaatatcaaaggttagttgggaggctgatttatttgtctcatactagaccggacttagcctatgctgttagtattgtgagccaattcatgcataatccgaaagaaaaacacatgcaagcagttgggagaattcttcagtatcttaaagccactcctggtaaaggactgttattcagacatggtggtaatctctcccttgaagtctatactgatgcagattatgctggctctgtaactgatcgtcgatctaccactgattattgtatgtttctttgtggtaatctagtgacatggaggagtaagaagcaagatgtagttgttagatcaagtgcagaggctgaatttctagctatggctcagggtgtttgtgaattactttggttgaagattatacttgatgatcttaaaataagatatgaaggatctatgaaattattttgtgataataaatctgtcatttgtataactcataatcctgttcaacatgaccggatcaagcacattgaggtcgatcgacacttcatccaagagaagctagatagcggtttgatcacgactccatatattccttctggacttcaaaaggcagatattctgacccagggactttcctctgaaagatttcaagagtttactggtaagctgggaatgattaatatctattcctcagcttgagggaagtgttgtaaatagatatattttaaatagatatattttagattttatcttaactattatctttagttatctttaattgttatctttagttgatagttattatctttagttattatctttatctttagttgatctctttaaatagagaccttttgtattactgtgatacacgattcatatttataaattcctgcttttttcaaggatgggttccacaaaaactgcagcaatcttgccctgcttaattaattctaccgcagcctgagcatttccatactctaaaaaggtcactccaggcataacaggttcaaaaggtgttctgtattacactttacttgtcaaagcaagtgcacccagggttctcccatggaagcagttactaaaagctatgaactctattcctggctctttcccgttggtagctgtgtgtctctgatattttcttgcaaatttaatagctgcttcatttgcttcagttccagaatttgcaaagaatacacgatcagcaaatgaagaagtcacaagacgcttcgcaagttctacctgcatcaattacaaaataattatagaaacaaataatgaaataaaggtagaatgcaacactgtgcagacacataacatgctgctacaagaaatgaaccaaagtaaaacataatggaaccaccacaaacaattccaaataaaaagatacaaaataaagttataatatagacatgcaagataacattacaaccatatactataggataaagcagaaactaaacaagttgttttctttccttttcataatgtagatacaatataagagtgacattacaaaaccaaatgatcaatgacaatttctttctctgcaatctccaagcacaaggaagtatacaactgaaatcttcaaatctgaaactctatcaaggagggaggattcaaataaagccagattaactatcatttatgcaaacacggaaaaaaatacagggtctaaaattgatattggaaaaaatacaatacactggactatctgaacattagggtcattgagagagatgtaaacaaatcttttaacacctatgaagactaataactaaggattactaataaagtccttcaaattgtaaattaaaaaatactcatagaaagcttaagtgttgacgatgtaatgcacactatgtttcatttgggacttttttttcacttttataaattggtttagttttccttttcctgctagagttctagacaaattctagcttatagagttacaaaattgtgtgagcgctatactctaatgccatgtttggtagagaagagaaaaaaagggtagatggaaattaaatgagtgatggaaataggtgagaaataaagtagaatttaaaggtgtttggttgaaaagaaatagagaagagatgaggagaggagagagacatagagatgagtagaaggggtgggtaagcatgcctatccgaccaagtaagcccacattggcagcggaccggatcaacctgttccgcactcttacacggacttaatacattggtcctctcccgtcccgcggatttcgcgggccaaacgggttggtccgcaggcctaattttataaaaaaaaaagttgcaatttcaaaataaaatatatttttctctaaaaaaatagtcaattatactcaattatatatattttaaaaaaagtcttaataaatctctaaaaaatactcaaatacaaaagttttaacactaccaaatcaattttcaacataaaaaaaaatttctggattcgaacccatgaccaataagtcacctagacacaactttaccgttatattagggctcatcctcaaataaattttcaacataaatgcaaagaaattttggattggacttttaggatcaattgggtttgggttggtcttggttagtgattgtgggtttttgggccaacccacggaccccacaatccaaacccacacaactcgcgaattatgtgagacggatccaaaatcttgcataatcatggattttttaaaatatattggtctgtgacccttgcaaaccgtggactccacataccgatccattaacctgagcccatttatccacccctaagtggaaataggtgagaaatagtacgggtgggtgggtcccacaattttaaaaaagtttccaccctaatcatatatcccaaacaaaccaacttattttcatctctctccctcatccctatttctcctctaccaaacaaaaccaaaggtttaccaaagcttgataacagtaataacactaactgtgtttctcttcatttagtgaatgggtacaatacaaaggaagtactcaatccaggaaagtaactcctgagaagctatggtagatccccattaagaaaatcatgttccaccatcaaatttaagttttctttccgttcactttgttaaaatccaacctcttccatacaattttcaaaaaaaaaattaagtgcacataattttcaattcagtcccatgtcatcataaagtcagtaaattatgacttccgaaatctccaataaagccaaaaataatagtttgataaacaccacattgagcaatcatgaataattaaatcatcattcccacctccaatgccccaaccctgacattgaaaaacaaattctcttaaaagcatttacaaaattatgcacagcttcacagatcaaaaaatgcaaacaacgataaattatgtaagtttgaattatttataataaaccactaatgaaacaaatagcaaatttgttgccctgcttaagttttttaggaaaacaagtatcttaattcaaacaaaccaaaaatatatatataccagtagtttatttcagattttttatatgatacctaagcaaattgaagatgatttagaaataactcagatacaaatagacaactcactgttagtgtatgcccgtaccaaaggtactgattggtaaacataaagttttccatgacttttatgcagatgaagacattgacataacttacagacatataataacatgcacgaacatgaggtattgtgtagaatatagtgctggtatgagtaagagtactggcttgctgaacacagcattcaaccaatctgcatccccgtgccctagtgcattgacagcaatcccagcactcaaatctaaatattctctcccttcaatgtcatacaacttgcaaccttccccctctcaagcaccactggtgttcttgcatatgtccccaccaagaacttcccttccatctctatcacatccttggttttctccaatgccgtcttcgcaatattaggcgcatgcgcaacaacatccacattaagacacgcactcacaaccctccggcatctaatctgaataataggactgcttccaaccaaagtgctctctctctctccaaattgaaaaattgctcgggtttgtaacacgacagagaaattgaatggttcagagacatgtaaactgcactcattgtgttcaattaagggttagattccctcacttcttccttttgctgaaacataaaaagaaatgaaatcagcttcccatatagttcagacttcaatcactccacttgaagcaagaattttcaggttcaggtcacctctgtttattcaaaacaacactgatacattggcaacagaaaatgccaaagagaatagctagcagaaaagaaagaggaaaacaaaaaaccaaaaaaactaaattaagatttagaatcaaattcaaattcaaatgcatgacaaatatgaccagtaaacaaaccagaaaacaccacagaaaacctattctactgttattttggtccccaaaacttgtacggactatcccccaaagtgaaagaaggactcaacaaagcaaaactctgatgcagctttctatgcaaaactacactccctggactcaacaaagtaaaaaagaaaagtttggtaattgagaaagaaaatgcagaaagaaaccattgccataacactaatctattttcattcttcaccttgtgagtactataaaataacacaaaattaattcacaatctatcaaattcaaaaccttcttctcccaacaaaatgatcaaagctagccaaaattcaacttcaaataagataacaagcataacttcaaagttcaaatcataacaattgcttttggagaataaatattgggactcccttatcctctgatttcaatctaacatccattggtcacaatggaaatcaaagtcccatttagtggtccccttcgaccttcatttttcaaatactaacaaacaatttctaattttccatggtaaacaataaataacaacaataataatttcatttctctaagattaacaatggatccaagcgaagcagtgtgctgtgtgaacacaaagcagaaacaataccttggcagtgaaattcaaggtgccagtttccaacttgggagctaaaacaaacaaggtgttcttactttcaagtgtgtgctgagaaaaaattagaggcaaaaggagtagcagagagacagagagagttattaatactaataaattaattctaataaataataaataggttcaaatgcaatatttttacttttattttttaaaattcacaattttagtctttctattttaaaataatttgatttaattttcttatttttaaaatcaacaattttaatccttttattttaaaataaaaatttttaatctcttatttttgtaaaatttaaaattttgattcttccatcaaaattgaaagagttaattaaatagattaatattaactataacataaattaaactaataatattatatcacatcactaaatttaaatcatataagattagtttcttatttatcaatatttctcaactgagctatatatcatcccctaaaaagttattttacatgcgtgtgaagtaaaataaagcaagaaaatcctgatattgtggtgactggtgatatttgtgcttggaggctcacgttttattccgaccttagggatatactaacttttatggaaaccataaagttgttttaatgtgtattatcatcatggttttataactacaagtctacaactttctactataaatattaaaatattaaagtgctaattgtatctccttttttacttaaaaaacctcttctttcttcttcttttataattcttttaatttttccctcttttataaaaacgcacacccctttacccaatacccatagagagttgttactcatttcaagagggatgaaaatgatatcaagataatctaatttagttggataaataaagtgtatgacttgctataactcctctatgatttttgtaggataaaaaaataatgaaataatttagtagagttatgccaggaactttctccccatccccaactctctgtccccactttttaacatatacaaaattatagtagcagtatagcatgggggacttatatagctgttacacatcactttataatgaagcgtataaattcaaattgtataaacttctgtccaggttcagattagtttaaacttttcacaaaaagaacttggtcccataaagttttctccagatattttaactataagcttcttttttttagaaaagataaaatctaatctcttacatgtgaatttgatgcataaataaactgtacaaaaaaaaatgtatctaaacattactgcacctagctgctttctatgtctcataaatttgcagaattatttagcaagcaaatgtatggatttctttcgagacaagcaatggttcagtgcaggtatcaaatccaacaatattactcctaatatagaattgcttatgcataaaatggaatgggcaatgctctacgagacatataaaattgaaattcaacaaatctttcctaattattgagaaatatttgtctaaaaattattaccattcccaaactattaggcctgtttggtagttaggatgtgattatatatgagaggaagataaaagcataacaaactttaataagttacaacactgctaaaattttcactgattaaacagttgtttttacctcaagatgtgaaaaccatacgaaggacacctttgatgtcaacagttaaaaatagcgggatttggttggggacaaagaatggtctttacacgatcaaaagtgcttatcttttgatcatgcagaaactcatcttttgatcatgcagaaactcatccagcatggaagctcaatgttccacctcgtgccaaggtggtagaaaccataaactatgagaggatacatgcaaggtgtacttggatatctctcaattttgcataaagcttatgcatatttaatttcaagattggtctagagctaaagactaccatgtgaacactgagcaggcacattctccacatattggttacattgcaatacgtaatgtgtagtatttttttttttatgatgcaaattgcacaagattcggcttatgtatcagttatgatcatgaagtcgtagtcatatctaagactaattattggaggagcttgtgtcttactgtgtctaggtatcctatccgctttggttgttatatatatctccttagggctacataatgtgcattttgagatggattgtaaggtcattattgatatatatatatatatatatatatatataatccttatacttttaatttctaactataactttgatcaatttaatatatgaactttacaattcatcccttctcaccgtttgtgatgagggacaaaactattatatttctaaagttaaaataccaaattgattaacattaaaataccatcactaataccatattttaacccccaaaaaaacttatacttgtctctaaataataataataataataataataaaattaatctaccagactgtaactaaaaaaattaagactaatctcttttcaagtattaaattgaattatgtttttctaaaaaaaaattatatacagaaaacaaaatccaaatttatatgctaaaaaaatccaaccatctattttattagtgataaaatattttttatactttataataaacttgcaggcccagtgtcgagctttctgtacctaatgttaattcaacgttataacatctgcagtagcaatccaatttattttccttaaaactattctacaaagtattgttgaccaaattattattcacaaataaactatgtttaagctatttttaatatattgtttattcattcccgcaatggatgactacgtcaattcaaatgcagacaaattaaaagggttgaaattaaaccaagacacttccaagggacaaagctattgctttcttttctttctaataatgttatcccgaattcagttttcaggttttttaagaataattttttgacattagctagaagaaaaaagaattaaaaaatttaaatccttcaaatattttattttttgctagttttatacttattaaataaaatattaaatatgttatttccatttaaaaatattaagatacttaataaaaaaatctcgtaaaaaatataaataaataaaaactcatttttgacctttaacctttaattgaatatatagtccaaaaacgataaatttatcttatcaaagcaattttatatgaattcccttacctcacttgttttttttttttttttttttttgtgaataactcttagggcaattttcaaattgagtaataacaattaagtgaaactttttgtgatttaggtttgtataataatcttctaataatcaaagtaagtctatacaagcaatcaaaatatgtcatcatcccttgcttagtaatattggacgtgctcctcattcaaatttctttttttaacatttcttttctatttttaattaaataattagacgagtttaacttttatgtcaggataaagtttatagactatcaataaatcaaaaattatattaagtataacttttaaaataattatttttttatcaaaaattagttataattatttttttttagagatcacactttttctgagtatttaaaataattataataaaaatcaataaatctttttcaaaagaaaaattaaaaatcaacaaacttattataacaatttttattagttagtaatacaaaaatcatttacattgttagtatatatgtattattaactttaaataaataatactacttgtttaataattttttaaaataaatttgtgtacatgtttttttgctataataaatagtgtatacattaatactaaaatgtgattcaaactactcacaaatttttttttttcaacatcagccacaaatttaataacccttataatactaattaccttttaattaattaaagtgtatttatttgttaacacgctcacatttattaaatttagccaacactagatagataaccctcagaaatttccagtgattttactttcaaggaaaattactctcttagcccgcacccccacccccacgcccaccctgttgcaacttgcagcagttctttcttctttcctccaaatgccaatactttctcaccattcctctcaccattcatcgcattaccttaactaataaatagacacacaacgaaactcgaaaaaccacccacagaaaacacagacaacaacctttgacacaacatagtggagcaagaagaatcgaattagtttggtttctgtttattttttttttctttttctcctatgtaatgcatcagaagaaatccgaagtccagatcggaaaagaaagcagcggcgtctcttccgatttcaaccaccacccactcccaaccctaactccgaacccgaaccaagatgctctccaatcactaacctccaccgcaccctacaaaagaccttccctcaccacccaaccccatctctccaaatccacaaccctacacaaattcccaaccctaaaaccacgccacgtcaccaccaccaccaccgccgccgccgccgttctctccctcctccgccgccgcctccgtctcttcctcttcccctcgctccccttcctctacttcctcgtctcccaccccacaaactccttcctcctcgatttcctctccgccttctccttctccgccgcgctcttgttctctctcaacctcgccctccctcgaatcccctccctccgcctcttcctcaacctcaagcccaaggcccgacccagcctcaaactcccaatcttctggaccgtgggagcccgcccagacccggcccaggcccaaccacagcccggggccttcgcttctccgtggtgccctacgcgaacggcgacgtgtacgagggggagctgaagggagggaagtgttgtgggagtggggtttactattacagtatgagtggaaggtatgagggggattgggtggatgggaagtacgatgggttcggggtggagacgtgggcccgggggagccggtaccgagggcagtaccggcaagggttacggcatgggttcggggtgtaccggttctacaccggggatgtttatgccggggagtgggtgagtggacagagtcatgggtgtggggttcacacgtgcgatgatgggagcaggtatgtgggggagttcaagtggggcgttaagcacggccttggacactaccattttaggtatggattgggggaggtttgtgtttaattgaagtgatagagatttgtgtttgaatttttttttattttaaaagtaagttggtagtaaaattctgtataattatttttatctaataatgtaatagttaggtaaggttgttttaattcacaatcaattctggactcagaattgatttgccagtgtgaaactgaacacgtgaatatttgcttaagattgggttagttggtgtttcgacatgattctggattatcttacgtgaatccaaacatgtctgaaatcagttggtttgttgtagttgatggctgtttgttggcttggatttgttggaagttgattttggtgtcatttattggtgtttgattcggatttggatgtgaatggtggtgggtgtgttttttatttggtttgttgtgtgtgtgtgtgtgtgaatgttttgtgaggtgtttttggaagggtgttggtgcttggtttggttttgtggtttcttaggtttgtggattatggcaatatcttacttcttgaatgatgtttagctgcttgtgtgtgcatgtttggggtgggggtgctttgttgtttagctgttggtgcttagggtttaagaattgaggatgatgttatgttatggaggcttttgtaggatgtaattgtaaactgattggatgtttgttttgttttgatttgttgtgtgtttgtgtgtagcttttgtgagttagattggcaggatgttggggcttgatttggttctgtactttgtcatccgtttcgtaggtttgcctcaatttttcgttcaataaccttttactgctctctgtctgtgtgggttgtgttagggcatataatcttgaatgttggaatgtcattcatttctattcagtttttacagttgaaagcatgtgcataggggataaagatacacaaaagcttgctttgcttcagttgtgaattgttagttgtgaattatgcgttgtgtgtgtgtgattatgaacttatgatgttgttgattggtgtttggcaatcaagcatggtgttgttggtgttgatttttattttgtttgttgtgattgcgtgcatgttttggttttgtttgttttgcatgtatgaatgttttataagatgattttggcaggttgttggtgcttgatttgcatttggtttgacaatttcttccttctggaataatgtatgttgctctatctgtccatgtgcgtgtaggtcttgctttgttgttgacatgttgtttggctattggtctttagtgtatgacaattgagaatggtgtgatggcggcttttttatttgatgtaaactgccctgttttgttttgttttgatttgttgtgtgtaaagcttttgtgagttactttggctggacgttggggattgatttggttatgtgctttgcctctcgtgggttgtgttaggttttattttattatcttaaaagttagaataccagtcatttcttacagttgaaaccatgtgcatagaggataaagatatagaacatgtctttgatttaatttgcttcagttgtggcttctgttttgtcaaaagtacctgtaggcctttgaaattttacttggcttgggtcgtgtatcagttgtgtgtacctattggtaacaattgttgggcataatatgtcatgcacttattttgaagtcattgttttgagatttttgagaatgttcatttttaatgtatctttagccttttctggaaaggaagtaagatttaaatagactgaatactaataacatactattctaatggtagtttattttacctacattggcatttgtctgccaactgactagctgtgtgaaagctaataaatgggagtttaatattgaaatcaaagaaaagatgcagtaagcatgaaatctcataatgaagttggtcaaattgctttgaataaatggcctgagactgatgcttttggttcaaaagcacctacaccacccctgatgggacctcatatggggaattaagaagaaaggaagaggcagcaagaaaggaaatgccacttctttgtgcaagtatactgctattatatgaaaagccacattcatttgtggtgtctgattactaatttgatacaaaacatcagtctgaaaacctttccttcttattgttctacattttgagttttgaaacggtaaatgtctagtgagtagcaagtataagtttgtaggggataggggccatacagggaaaacaagcatacttcttaccctgatcatggtttaaagacacccgccatagcaatcatttcaaacatttttggatcagtaaaacccaaaggggaatggaaggggtaaagattgtagaattatcaatggcagtatgaaataggattgatagatttcacatatttgtgataattcctgtatttgtaatctttcaggtgtttgtgtgacatataaagggaccttttccatcggattgaaaggaaaaggaggtgatggaagtattttatgatattattgtatttgcttttgaggtgctctctttatttatactattggttgatgagaatgagttcattttcattatctgggtgaacaattttttatgtccttctatggaagaaagaccaatacaagagcagagtagaaaaccattttgagggaatacattatttccttgtgattttatatttcttttgtgattcttttgaataaaagatcaaatagttatctataaaaaccactaatacattatttatgtttcataaatttcaagttggtgaatcttgacacaaattttaaggggttgtgaatttttgtatattaagaatacttgagacaacaaatataattactgaaatgcagtaaaaactgaaagattaaaagtgtaaacttgcatatgacccctattgtatgtattcatgttcttaggacttatcttcattattgctaatttcagtttacaacggaaagagtatctgctcccaaggatagactcagtttcgaaggtgctttatacctctcaaactttaaaacaataggttattccataataataacacaacacatgttctgaagggacacataatcttgagttccttgcaagaagataattccacaagttggccttttttgttaagcatctacaatctacactgataccttctgttttttcatttcaaaatggaatgtgctgtcttgggcgtgcattttatgaaaatcggtgcttaattctatgatgcatgaacacatttttctaattttttcgtgaatgtgggttcctctcttctcaggatcattggtgcattattgtttaattgaattacagagctttgagtgactgctttttctttgctcaccagtaagtgtttttatttttgttggtactaattatttctgtttttatcagaaatggggatacatatgctggtgaatactttgcagataagatgcatggatttggggtatacagttttgctaatggccatcgttatgaaggatcctggcatgaagggaaaaggcaaggtcttggaatgtatacatttagaaatggagaaacccagtctggtcactggcaaaatggagtccttgacattccaagcacacagagtaccacctatcctgtttctcctgttggggttaatcattccagagtacttaatgcagtgcaggtacactctacattttatgatttagtttaccttaatatattgcttaatattatttctcaatgtatcattaaagaaaaaagaagtcgccatagaatagtctgggtgatatttatgtcaatggcataatgatgtgcccattttttctgagcaaattgttttaccctctcttgaaaaagatgcttaaattacactcccctctcttaatcagggaatacaagttgccccgtaataattttcaatatagacgaacctcttaaacaattgtaaacaattatcaagcaagagagagaaaaaactctagaaagtccatttacattaaaatagactcaaacgtaacttatatccatctttcaaggagaagtgcataatttaagcatttctcaagtgagaaaaattgacattctctcttttgatgtgaaatgtgatatacttaaggtacatgctttattgtaattttttatttctgaatctacaaatttttaatattagtttccttgttctatgtttcttggtttcttatcactgtatcttaacgattgtttcactaattccaggtaaaaatagtattactacacccctagaaataaatagccagaattctcacagattttagctagattcaggagttgttggataagataatactaacagtccctcatttatccaaatactccataagtgtgccattcattttgtcaaaaattctctctgcctacaattttccatattattgaacatttacttttatacgtatcaaattagctcatatgtgtagaagaagagacaaaatcaactgcaaacagttaagtttgcatcattaggagctttcaatattaatgatgtatttccttgtgaaaaaataggaagcaagaagagcagctgagaaagcctatgatgtggccaaggtagatgagagggttaatagagcagtagcagccgctaacagagcagccaatgcagctagagtagctgctgtcaaggccgtgcaaaaccaaatgcatcatcatgttaacagctcgagcatcccaattcccattgtgtgaggctgtcagctgcaaacttttgatagtagagatgccctagatcgtcggaagaggtcggtagtttaaactgctttgtttccaccgtcatcatcaccgcaggctgaatgaaagcaagcagatttattatccatctgccacgagtcttgtatagagggaggaaggttgatggcttccacttggtaaaaaaaactacatatacatactatattttttccctttgcctacattttgtaaacttagatgtaaatgctggtgtgcgggtgaaacctcaaccccgccactgttgtaagatcgcttggtaaaataaggagagaaacaaacatctagccgaaaatgttccattttttcccacttgctatttttgctttatctgactttggaatgagacatgttccatgtcacgtgttaactaagagttttctattggttagataaggcatcgtgtttgttaaaattaaattgtaaagatgagggtttataactatattttatatatcagtaatatcgataattttgtttggtgtaaaaggttgaaagcatgattggcttaaagaattttgggtctgatgttttgctttatctacccaaatgtctgcacctttaatgtaactgaaaacaatgctctttattgattgggttgcatctttagtcggtgggactgggaaagcatgtgagaaaagcagagtagtgagaggaggtttagattctctgttttcatatgcttagtgccgatttggtttagcactttagcgagttagaggaggtttagatattcattttgaaaaggttgagaaagaaattctaataaaacaagttttattattattattattattattattattattgggaagttagaatctattttatattagaactcaattatgagttgcttcttgccaaacttcattttggattctagaatcaccaattgaaacaccctaatagtatgtttggaaagagaaattaaaatggggaaaataattatttagagaatttaaaattcttacctcttaaataatttgattggatattcatttagaaaaaatttaaaattttggtattttaaaatggaatttgtttttaactaaaatctagaattctaaattttcttttaaaacgtaggaattctaaaatttctccatagctttggtgttcttgacgccattgtggaaggacattcccccattttcgaatctataccctctgacatttagtaactgatttagatgcggtaggcagaggagaaagagaaggtagataggcttggcgtcatcatcgtggagacgacggtggtgggcgaagagggggcagcattggaccattttgtcgggaatgcgagtcaggtggcgtcacgggggtggtagtggtggcggctcagacaagccatggcatgagttgaaataggaaagggagaaggagtaatcattgtggaaaacacgagaagggcaaaagcgtagatgacaagtagtggagttgagtagcaagtggtcctcgtgcttcggttgtgttgtttgacaccttctactagagtaactgtttctaaagtagagaaattactataatcatttatcagtttatttaacatgtattaataaattataatactcctatttgtttatttatttagaccgaatgaaaataccattattgttaaggtaagaattaatatttttttctacaaattttacaataatgtatagtaggagtatttatcattttgagatggattaaagaatttgaaattaaagaaatttaaattggtttatccaaataaaaaattaaaaaaatttaagaattttaattaatgcatttcaatttttctgaatttcaaattctctaaacttttaaaatactccattcaaacacactttaagggcgaagctagattacatataaaaatatatatagaacattaattatttaggagagggtgagagttttgctataatgaatgtcaatccaagaattgcttgttaagtgtagttttatacttattacaagtaaaatatctatatcttttaaaatatattgtttattagtgctagttaagagaaatattaacaatataaattttaacacttctaatcataatttttatcatcaattaaaatatattaagattaagaaatgatgtggattttaatttttatttactaaattttacttgattttataattttaataaatttcagttaataacaaaaaatgtgtttaaaaacatgcattagaaagtatagtgttaacactcatctcaatctaattgttaaacatacaaagtatgaatttatcagagccatagtgagtttattgtgttccgtacgaattttctttcgtaagaatacaactttttttaatcagaaagctgcttatttattaaatgaatatttattttaacaaattaatttaaacaaactgatatgagtaattgataactgagtggtgatatgtgaatgttccatcattctaaatacattattaatatttaatatttgtttgttatttttttcttatcatattatgttatttatatttatattaaatcaatctttattgttaatagttgaataatttttaaaaaaaaatcttttaccactttgaaagcccgcaagatgtgggcctgtggctgcactttctgtctgagacatccccatcagctgttattccttgtcacctgacgccacctcatccatgttgttaatcccattatttcttcatccatttggcttcactttaatctgacaataagcatgagtgtttgctgtgtgatttgatgtgattttaatttaaaattagtttgaataaaaaaatatgatgtggtttgattcagttaaagaatatttatgaaatcaaaatcaaacaaaatcagtcttttgtggtttaaatttgattttattgaggtttaaaaattctgctagtgagtattaaaaaatgtttaacaaatttgttttaattggaaaaaatttaaataataactaattcaagttacaatgattaaactttaaaaaacaaggtaaaacaaagacgccaagacccgtgggagagagacactatcggaaacgtagagatgatcacatgaagagcaattttaggcattagttttagggtttcaattttaggcgttagaggagagagtgagcaactgtgtcttaagtgttaattaagtttagtattttaatattagtgtataattgtatggaagtgtcattttcacaaaagattaaaatacatgtggtatatgtacatgagtcctataataattaaactaatgagcgtatttcgatttattttgatttgattttcaatgtcaaaccaaaaatcaaatcaaattattcaatttaagagaaacaaaaatgaaatcaaattaatatcctttaatttttctgtgatatgcgactttttggattagtttccgattcggtttgaacacctataacaacagttttttgtaccttttattttttaattttgaaaacattgttttaaataaatttgtgtttaaatcattgaacgtaattaaggcttgtgtttaaattttaaagtaatattatttttaaaaaaatacctttgatccagaatcaataagagaaaaaacttcaatagagaaactttaagagaaacaaattaaaatgaagcataataaaataaaatagttattttaatttcgtatatttttactgtataacgcaaacgagattaatttcatttcgtacttctaaatttgaaaagaaaaatagcgatgctgaatgaatttcattgtatttcattttgtttatatacctcaatcaataaaacctaatacatctttttatttaatctctttatatatctttctaacaattattttataagaactgcactctttttattaattcagatgttgtatgagcaattagtagtgtacttatataatttactcaataagtgtaattcaaggataacattaaatctagaataaaaaattagttttataattgattcaaatgagtgaaacttgtaggaatatattaaatgctaactgaaagtcaaataacataatgattttaaaaaagtacacttaaagcatgattagtaatagatttcaaattgagatcttagatcactttttgatggattcatattgtcaaatgatattaaagatctctcaaaatttctctcatttttgtctttagtggtagatctcattatgagatcttagggaaagagaaagaaaaaaaaattattttttttttaacaatgtgcatatcttgagggttcttctacaagaactcatcctccatgttgaagattttttcacctcctttattggaaaatctagtaaagatcaaatcttgaattcaaaacttttgctcaaaatctagtaataaagatactctaaatatgatctaattgattgatattcgtcacatttaatatcttacacatttatttaaatagtctttaagctagttacttacttgcccagaatagaagaccaaagatgctttgccttaatcttaattcttaacctcaatcttaattcttaaatcttaatcttaatttcaatatataataaatttaatattttgtatcatcaatctattttaggcaaatgctaataagtaccttgggcacaagttaaaaaactaaaaaaaaattattgaaatgtataaaattaggttatttatgatttttttatactcatgattttcacattaaatatttttttaatttttaatcagtatcttaaggtactgattagttagactctttattttatcatgtttgaaacatatttaaatcggaactgatgtaattgaaagcttagcttgatggtgcacccgcattgtcaaagaaaatcatttatttagcatttaggtcactgtctagctcactcacgcgcaggcaaattcacagattttttaggtttaatattaatttagttcttatatgaactctagtattttgactttatatgtataagttttattctctagataagttagcttgtttttttttttttaaagatgagttagttaatatactgtattttgttctttatcaccggttgtcttatagctctcataattttgaccgttgtagtaactgctagaaaatttttatcatgaaagatatttctaacgtaaattttttttatagtgatcttggcgacaacgttagtaatggtattaatgatagagattaaaacacagtaaatttagtcatccagacaccaaacttaatttgtttacatgtatggtcgaaatattaaaactgtaaaagtacagattactaataattaaactaactattaaaaaaataattaaacctaatttgtaattcaaattcttttaatggaatgggataaaagaaaagccacaggctaatgtgggagacctccacatgttcaccaccgtgccaaaggttttatgaacataggatatatgtttcttttggaatgcgtgtgagactactgtttttatttttaaacgaagtgtgagactactgtaaaactacctaaattggattattttttagaaaaaacaaaccctcttctttccctttgttgcttcaattcctgcctgtccttttttttccattgttgttctgcttcaccaattttgaataacccaaatattattcaccagatcctaaattaaattacaaacatcaccataaaaaaattaaaatatataaaaagtaaactgaaataaataaataaataatctgcaaataaactcaaattcctatggacggcggggaagagcggcatgcatgacattggagaaaaagtgattatatgtaagtatttttgttttcgaattcatgttgacatgggagatatcaaaagagtaagtgatattaaatcaatgttagttatctcatacaagaaaacttttatcgtgggagactttgttctatcttccaagtttaccattggatgaagagcacaataatctgatggtcacagtgagactaagtaagtaattaagtagtttattccttaatgatgttgattaaaaacaaaattaatatttagttatatttcatgtgtaaaaaattcataacattattatattgtcaaaaccttcgtccttaacaaatatcttctgcctgaacctcatcttcttcatcattctcaagttgttcatccatttcattttcaacttctgacccacaaatgaaattgtgtcctacagcccatacaataacagcaacttactagggtaccttattccgaaaaactcatttccgtttgcttcaatttggctcttagaaatacgctcacacctaaaccaattttccaaactcggttaaataagtccaaaaacacattctcaacatatataggttattccaaaaaacataaataaattaataaaactattcgacgtggaaaagaaaaaaaaaacattaattttattgtcaaccatcatcatttaaagattaacccagccaccaacagagtctatatcccactgtcagattacaagggtcttcatcctacggtcttccaatgttttccaacttgggaaaaaaaccatgtttcctgcgttagaagttgtcctaatagaaatgcatatatgtatactatctttaatataaatttggccctgcaagtttttcgtttcatataagttcagcattttttaattttaatctataaagcacaaatttataaaaactaaaaatgaaaaaaaaaatatattaaagggattaaaattatatataaaaaaactaaaattgaagaaaaaacttgtaggatctaaaattgaaaaatcataaatctaccggaaataaattaaaatttaagcatataattttaatacatatattattattttatgtgatactattagtaagaagtattagtttttgttaatggcaggatttaaactcacgaactctctttcctttcattttctttttatcattagatcaatcatatatttcctactgagtcacgagtttaataacgctgtaaaagactctgccatctccatacgcccacattttcctacttttgcattttaatatgttgcattgcaaataaatatgatcatggtgtagtatagttgatgagaagatgaggttgagtccatggagcgcgtcacatgtaatattctaattgtatgaaattatttgtgatggcctcacaaagtttacatgtttatttgatgaattaacgagaactcgcctggaacaacgattgcatgcatttggcaaaagaaaccaaaaaccatcaaaccaattatcatggatttgttttggtttagtggcaatgtgatgccattttttctttttttgtgttttgcttgttgttcctatcataaatggaatgagtactcattcttctgtcgaagggtttcttactgtaccaaaaggtcttctgtttgatattctttgtcaaagtcttgggagtgtgagtatttgacagaacgaagggaggtacatgaaagaggcactccaacattcgagggagagtttgactcagagctattaatgatatatagtgatttggtgagaatgaatcggtcctcttacttagggattcacccatttttatactatcattgttgggcctaggatctgtgggtctatcacatcatgattgccaaatgaataatactcctcttgatcatgcttaagcacttctaatcaagtgatcacccttcaacgagcttagtggtgataatcatggtcgagtggtgttcgttgctcacacatgttgaaggtcgagatgtatggatatgtggtcaaagggtgtgtgcaatttgagtgtgtcaggtgtcccttcgacttgaccgagtactttatcccgcatattagccctacaagcccctttttggccttgccaaaaagaggggctttatgacatgtcaaaacgattacccccccccccctttgacggttatgcgcttttattgccatgaagtgaccgttacatcatggatgtaatagttacttcccacgtctattcaccttcccactttgggcatccaaatgtcgcatgatcttggctgtagttccgttttgatcgaacggtagggaaatgtcgtcggttgggccttgttccaggcctaactcctataagtagggggaggtccccccccccttcactctttgcccccaatatctatttatttactctgagtcgaacaatgcctttttgttttcatccgagtagtcaaaaaatcaattcttttgtggcgtatgtaataatggtgttagttgaaggttcgtcgtcgatggagtcggctggaagcaagtctaaggtgcgaggatttggcgacgaagtttttgaggtgtcgtctgactcccactatcgccaagatccgagctatgcaggcgttctaagcactttgcttgtatagctctatgtcggcaacgctaggactcttactgcattacttttgtagtcgtccgctatataatgaaaaagaataggaatacttcaatacaaccaagagggggggtgaattggttgtaccttggtaattaaaaattttacaatcagagtttccacaggatctttatcactttaaaaattattttgaaaccaagaatcttatattcaatcaaattcctctgtcaagaaaatcaatagacaactgaaatctttctgtgcaaataatttgattcacaaaccaaaacaataaagagatgaagattagaataaagatcagccacaatttttatattggttcacttcaaacactatgaagctacatccagttcttccactcaacactagaatggagttccattattgcaaattaatgttcttacaagatattacaagcctctctttatcaaccctagataaagttcagaaatctaaaacactatcagattcttagagaccaaccccactgagaacactactcagcaacccctagagaaacactatctctatttatcatgcaagaaactcatttacaataagccaatctttacagaaatcaaataacagatttacaacctcaaagaataaggaatgaattcacatgataatccaatgaacaaaatgcatatgaatgattcaccaggttgaaagaaagaataacagactcaatgcatccatttccttaagctttgaggctcaatgatgcttcactcatcaaatcaaaaacccatatgaatttttgtgaagccaagacgtttttgaacttagaaaactcactaatgaaagcttatgaatgtttgtgattgctcagaattcgaatttctcaactcttcaaaacacagagcaatgggttctatttataacagctttctaactgaaaataatcgattaaacacgctcttctaatcgattatttagcatatgtaatcgattaattcaagaatgtaatcgattaaagtgtttctaatattttctgggtttgagctatgaacattataattgattatcccgtcacttaatcgattaaaacaagaactcatgattttccaaatacactgagtaatcgattactgaatttggtaatcgattaaaacagagagaccaatattttcaaatgcactatgtaatcgattaaaatgatatgtaatcaattaaatcagcaaaacatgttagccataggcatgatatgtaatcgattacgaacttctgtaatcgattaagacagaaggtatatgatttcaaatttaacctaggtaattgattaattcgatatgtaatcgattacattgttcttaatttgttttccagaaggcacgaagaataaaataatcaatgccaacatatctgtaatcgattaaaacaggaaaacttcatttttccaaaaacttgattttaatctgccttatttattaaatgcttttgcattagccttcaatctaacaatcctaaatgaatgatatgcacactggattatcagatactacttatttccttttacaagaatcaaattgatcttcaagcttccatggcatttttgaaatgaggcatgttgaaagcacaaaactccaaagcttgattccttgtccatcttctcatgactcctcttgaatcaacatacaaggctcgatggatctcgctgatgcaactaccgaagcgtccactcttccgccgcttcacttcctcttataaaaattttaaaacctgttacttcaaagtcaaaataaggtcacttgacgggaaagatcatttttatgactaggcggagaatccattgtttcatttctactagcaatagtgtcctcgactgtacaactagtacctaaaggagttgttgactgctgacgaatgttgtgacctcgcattcctcgaattgctccctcgacaattaactgggcagcgccttgtggtccttctgcagtcaccagatcccgtccaggaccttgagggttagtttcatttcttttcaattgtttttcatttcttgctctaactttcaaatttatcactcgtgttattttgtaggaatcatgatccaggccaacactgatatgaatggtttccgcaaggttaggtgggctcggattgttgtcgctagtggactgtctctgaatgctaccagcaattgggctccaagagctcatgaggttctagcttatgtggttcccccgccatcaaagatcatagggggaagcaaaagcataaaaatcggagccaccaggagcatcaaagtggcttggacgaactctctggacaccagaaaggcaccttcctagagaaaaggcttaagcagccgatgctcgagttccaacttgccattgccttcactttgggaaacctcatggctttaaccaatgaaatattcttcaataataatttttggttgggtcatcttgtttagccatagattatttcgaagcaccgttgccaagtttggagaagaggcgacgatgcaaccaacttttgggccttgttttctagggatcgtccaacaccgaaggcttgaaacaccaattgttgaaggtcgaggattatttgaacacaacacatcaagccaacatgaacttggctggcgacaacaacaatctggaggaccatatgcttgcattgtcgaatgatgctaaaggactgaagacgcacgcccttaaatgtcgaggccctggttaagtcttgggacactaaaatcaataggctgaggttggccttggccgattccaacaaagagacagaggaagctaatgctgataaagaaaggattcaacataaggcctttgatgatgtttataattctcatgacgacggcttcaaccattgtctctggcaagtgttgcacgtgtgtgacatctttgaccttagcgtcttcgacatcaacaaagatgtgcatgaaggggagctaattcttattgatgacatcttagaggatgaggctgccttttcacccccgagatcgatgacccccatcgaggaaaccctcaccaaagaggtacatgctaaggagaccgaggatggagaaaatgtagagtatagggactaggttctctaggttttggacatgattttttgtaatgttggtttttgacactttttttattttgtaacaccagtctttggcatcttttgtaatcactttttgttgatttttggcttataatgaatatttcttttcaaagtgttggtggccttaccagacttttttcgttgttggtagcagcctctttatttatgtgttcggttaaatgacgtactcggtggagaaataatgaacaaaaattgcacaagaatttattcgaagggttaatgtaagccttatatcctttataaccttagtcgaattgtagttttaagaaatcaacaagtcttcgggcttaataaataatttgattaagttcaatcttagtcgaggagggcacccgataatgaacagtatgttaatttgtttaagttcaaccttagccgaggagggtactcgagagggaactgtaggtagattttgattaagttcagccttggctgaagagggtgctcagaaggggactgttcgtgagtctttaagttcaaccttagccgaggagggtgctcgggaggaaactatggacatattttgattaagttcaaccatagccgagaagggtactctaggggaactattcatgagtcttctagttcaaccttagccgaggagggtactcaagagagaaatgttcgtgagtcttcaagttcaatcatagctgatgagggtactcgggagggaactatttgtaagtttgaacctgttgatttataatcgaaggcaaacaatcaaaaataggttaggaaatatgtttattagaactcagttattagggtgtgcctcattaaaaccacctcagaaaaaaccatttcacatttttataaggataaaaaatcgtggtaagaaaaagagtacatcacccattacagaaatgcacctaactataataaactttcaaatgtgtaaggttctaagtcctcgggatgaccttcccagatagctattctaacttgtacgctccattcttcaaattgttgattcaagtgaagccaagtatcaaggaatgaggatcaagcttcaagattttggactttcaaacatgcacaaaggaaatgctcaaaggaaagcttgaagagtcaatttgataaattgtaaaagggagtatatgatctaataatccaagtatgcacatcatgcatcaatcgttcatttaaaggtcattgaattaattgattaagtaaaaggaaggcacttagaaagtaaaagtttttggaaaaattaagttgctaataaataatcgattacatgaataggagcattgattattttgttcttcgtgtcctttagaaaacaaaacatgatcattgtaatcgattacatatctgtttaatcgattactcaggctttttatgaaaagatggaactctctgtcttaatcgattacaatatatggctaatcgattacatgcctgtacatgcatcttagaaaaagacatgctgactgtcttaatcgattacttcatgaaataatcgattatattgttcttagtcaaaacccagaaagcttcaagatcattttaatcgattacattattttctcaatcgattacatagtttatcatggaaaaccatatatctctgtcttaatcgattacgtatcggaataatcgattaaatggttcgttcttgaaactcaggacattttataaacattttaatcgattactatcttgttttaatcgattacatatgcgaaacaattgattactggagcgtgattaatcgattattttcagttaaaaagctgttataaatagaacctcttaggctgaggtttgtaacttttgaatattttgagatttacgaattgtaagcagtcaaaaatgctctgagcttttattagtgataattctgagattctaaacacttagaagctttacaaattcgcatgagttagtgaatcaagaagaaaaagcttcatcattcattcaaagcataaggaaaggaatacattgagttagtaatctgctattcaacctgaatatcattcatttttcattcattcttggattatcaggtgatatctttccttgttctttgaaggtgtaaaatgttctttaaattgtttgtaaagatttgtctattgtaaatgagtttcttgcaagtgtagagatagtgtttctctagttttttgttgagtagtgttcttggcaaagggttttggtctctaagagtctaatagggttttaggcttctgaactttatctagggttgataaagagagacttgtataattgcttgtaaggatatttttgcaatagtggaactctactctagtgttgagtagaagaactggatgtagcctcatagtgtttgaggtgaaccagtataaaatctgtggcaaatctttctcttaatctcatcatctcttaattactttgtttgtgaatcaatatcattgctcagaattctatactctgttttctattctttgtgaaagggaatttgattgaatattgattcttggtgttgaaacaattttcgaaagtgataaagatcctgtggtaactctgattttaaaattttaattggacaaggttcaaccaattcacccccctcttggttgttttgaagtgttcctttgtttttcacaaattgtgttggatcctaaagggtccttcttagttggcggccagcttcctatttgacgagggctttcgggcttcattgcatgctcttcacgctggcttagatttgaagaattatgtcatacaccgctttcaaacttcggccataaggactgcatcttctagtacttggtcgattaggtccagatccaaccgtagtgcttcgttgttttagacattagcaaagtattgccttcgtagagagacctctcatacttcagctggtagcattgtgcctatcctatatgtcagtgaaaaaggggtttcctgagtgatagattgagggtttcatctaaaagccaaaggacctctactaactcttcaacccatctccccttggttccatctagccgcttcttcaactcactcaaaatgaccttgtctgccaccttagcttgtccattggtctaagggtgctccatcgacgtcaccctatgcttgatgccaagaacgctcaagcatttctagacctcttgggctgtgatgtttgctagtggttcgaccttaacatacttggtgaaataatcattggccactaggagaaatttccttttccctgaagtcatgggaaagggcccgagaatgttcattccccagatagagaacaaccaaggggaaaccacagagtccatctcttcggctggacaattgatgtgttgcaaacacatcttaattttaggctagttttagattataattcagataaataagttaggaattagaataaaattagttagtttattattatatttaatttaatttcatttcatcaccatttgtgcattttagggcttaaagaaggagaattaaagccaaaggagggagaaaagcaaatctgaagtcccgcgcgggtcacgccagacctcgcgcgaacgacaccacaagcaaaatcagagcttgtttcgaaagcccctcgcgatcagcgcgggactccacgcgatcagcgccacaaattcgaatcaacggcgcgagtagcgtcgcaagccgcgccatcagcgccacggaatcgctgtttccttatttaacaagattcagttcgaaattggcacagaataagggcctagttactctaattaaatctatctataaataaaggcatctggactgaagaaaaaacacctacacaccattccacacctctctacacttctatacatcattctacaccattggaaggcaagaataaaggctaggtcgctgcagaataatgagttatttgacagctttggtttctttgaagcctatggcaggctaaaccttgtattgtgggaaggtcatgaactgatgtaaactcctctgtaacttgactggtattgaatgagaattcttattgttttattttactctgctctttattgtttaattcttatttagaattggccattctatttagatgttgagggttaggattcgcaatgaggacgttgggattctaatttctgaccttagtaaaataacagttgttcatcacctagagatagggatgcgtggctgcagaactttataatatagtcttttatatgcttaacttgatagatttcatcaaggaattgggtctttgattcgggttaaagggttaattcactaaggaattagggattaactagagtaggaagatttattctccgagcaaaagaattcggaaacccttatgatatgttctctaaatgcttagtttgacagaatcgctaagggcttagggttctcgatcggattaaagggctgaatcgctagttatctaggatttacgaatataggagagatttgtcatttgtgatcaaatttgataacccagttaagtgaaagaggtagtgaacattagggattgtgcttgaccacaattgtttctttcattggtaatacttcaactattttactgtttattttattttagttttctattcaaatcttcaacacacaactattatccaaaaatattttctttttacctccaatcacatagaattaatattactgtgaatttcaccccaatccctgaggagacgatactcacttacctattttattacttgaaacgataggtgcacttgccgtattgtgcgatttttgcaacaagtttttagcgccgttgccggggactggttaatggatttttgcagtaattttaatcttgtgattggaatttttgttgctaatcgcttctctaagttttatgcgaggttcagttaaccctgaggatttacagttcgaacctgaaattgaaagaacactccgaaggagactagccaaacaaaggagaagagaagctgaatactttgactttgattcaattccaaaattagagtcagaagcagagatggctgaacaagaagcaaataatcagccaagacgaagaccagaggatgaactaatggaggatattctggctcctatgttcacaagaccaaactcaagcattgtaaggccaccaatacaagctaaccactttgatataaatccttcattgattgtattggtggaaagaagtcagtttggtggggaagattttgaagaccctcatgatttcatagatagatttctgagaatctgtgacactatcagacaccaaggggtctcaaatgatgcagtaagactaagtctattcccttttgctgttaagggaaatgcattgagatggctgaactgacaaacatcaaatagcatctcaacttgggaggacttagtctcaagattctttgcccaatacttttccatggataaatataatcggttggtgaatgaaatcaccaattttactcagaatggaagagaatccctatgtgctgcatggaatagattccaagaattgatcaggagatgcccacaatatgacatgcttgtgggtaagcaggtacgtattttctttaacggtatgactcctgaaactcgtatgattgttaatgttgcagcagggggcacaataaggtcaaaaactgcagctcaaacctatgagctgattaaatctttggcttgtactgaaaatgaaagcatcaccattcagtcaacgaaagaaccaatacaattgtgcagcaatgatgccatgcttgcagagcagaaaattttagcccaacagctggctaaattgaatgaaaaaattgatagacttcaagtctctgcagcccaagtttcagccagtaagccacatgtctgctgcgaatactgccaaggtgagcatgaatctaatcaatgccctattcttgttggagctgaccctgtgcaggttaatggcgtttggaatgatcaaagacagcagcagccataccagaggaacaacaattttgctgcaggaaataactaccagagaaatattcaaggaggaggattagactataagtccagtcattatctgcaaccccctcccattccaaccactagtatctctgaacttgagaaggtagtgatgcagctgtcacaaacaacaacaaaatttatagctgagactagagctcatcacagaaatcaagatgcctccatccggaatcttgaaattcaaattggtcaattggcaaaggaaatttctgaaaggccacaaggacagttccccagtgacactgtgacaaatccaagggaacatgtcaatgttatcaccaccaggagtggtaagatgctcactgcacctgacaaagcagaaaaagaaaaggctgcagaatcagaggaagaaaaatctgcagaaaaagtggagaagaagaaaaatactgctcctccaaagaagcaatgggatttctctcgctttgagaaacccccatacccggtgcagaccaagcaacaaatccagcagcagcagtttgccaggtttttagacatgtttaagaagttacatataaatattccatttgttgaggcattagccaatatgcctaattatgcaaaattcatgaaagaacttctgtctaagaaacataagctaaaggactgtgaaaccatagcacttactgaggagtgcagtgccatcattttgagaaagcttccaaagaaattgaaagaccctggaagttttaatatccctatagctataggaaatatcaatatagggagggcactacgtgacttaggggctagtataaacttaatgccattatcaatgtgtaagtccctaggcataactgaattaaaacctactagagtatccttgcaactagcagataggtctttaaggaaaccctcaggggtgattgaggatgttttagtgaaggtagacaaatttatattccctgcagactttaatgtgttagacatggaaagggaaagtgaaatccctctactgttagggagatcctttttagcaactgctagaggcttgattgatgtagaacaaggaaaattagaacttaggatggataatgaatctgttgtttttaatgttttcaatattgtaaaagatccatctgacacacataattgttctagattagatttgctggataacatgaattgtgcaggtataatagatgcagaaaatacatcagcagaaaatttagatggaaatgcagaacatgatgccacagcaaataatgcagaagaaaattcaacagaagctgaaagtgcagcaacaggcattgctgaaaaattgaacattgcagaccaagaatccatagcagaaattattgaacctgtgctggaagtgctgcagaaaaaggaagatgatattccagctgaaacaccaaaggttaagctgaaaaagattgcagcaaaggctgtgaaaacctttgagaagaaatgtgccaaaatgctggatactgcacaaagagagcatcaacctgcaagcaaaatacatgtagctgcagatgaaattgctaggacttgcaagaagaagaagatcaagaagtggcgcaacaaagaaattgagccaggacaaagtgtgatgctatcaaaatatcgcctgaaattttcaggtaagtcaaaattcttttggtctggtcctttcttggtgcaaaagatttgctcttatggaacaatagaaatcaaatcattagacaagggcaaaccctttaaagttaacaaatgctggctgaaaccttattctgaaggccaagtggatggaaccacagctcctattccacttaaatccactaatgattaaactgcaggatgcgtctagtttaagacgttaaacgagcaatctttcgatgtaaatacatgtttttaagttctatttttaatttgatagcagtagatttatacttcatgcatgttaaattttaggcatttaggattattgcatttttagttaagtacaaaaagcatttaaaaagaaagagaaaaggcctgttagaagtgtggcgcgatccgcgccaattgtggcgctaaccgccccaatgactcggccaatccacgctaaccgcgtgaagctcgcgctggtcgcgctatccattcgaccctgagcttccatttgcatgataaggcactaatcgcgccaagactgacgctgaccgcgccatagccacagtcacttcacgctactcacgtgaaccccagcgctaatcgcgccaagtttttgagcagaaaacccttaaagtgtattcccgcgcggatcgcgtcagatgccttgaaaactgttttaaatttaattgattattagaacttgaattgggcctgaacatgcaatgtcccaaagctgggaatcattgaggctagtcttaggacatgaataatattgggtttaagtcctgtgcattattgaactgaaattgtaaaacttgcagacaccctaattgcttgaaatgtgaattgcttgaatcaatggttaatgttagagctatgcttgcatgaaatacttgaattctgaattttggtggaagtaagcaccttaaatctgggaatccaggtaaagctattcaattccatgtaataatgtgcagattgtttattggtcaacttgatgaaatggaaacgatatctgcataaaatattgaattacacctagttgggtacatgcctgaatttaaatctgggaatcataggcatcctgcgaaattctgagcagtttgatttcccaaatgcttttacacatacttgctgtgttaaaaaaatgtgctgtttattttgaatactaatcactaatgcacagtctagctgaatctgaaccaatgaaaagaataaatctgggaattcagccactgcatcaggtacatatatggtttctgttctgagttcagggtgcacagattgagaaagacaagaaggaaagtgcagctgcacctggcaaccaattgacagaacaggaccatttattttgttttaattttactgttttcatttttaattttcagtatgcttttagtttagttgttttgttagttagctgttttaaataagttctgtttggattaatgtttaattctgattgagattctcaaataatgcagatatgattgaatatatagcaacacataatacctttcacttattgctgaggacagcaattttctaaatctgggaatgggtgcatttgcatgatttgaggaatcacattcaagaaaacaaaggatgtccaacagagaatttttgttttagttattattttaaatttttagttgaagattccaataaaagttggcagcacatcaaatttttcagaattaaaagtgaatggacacagtaatagataggatttctttaatgaaagcttgtgtgaaatgaaacataacatgaattgcatgacacatgaatggaattgtgattgttggtatatgatatgcatgttgaagttgaagtgttgcttgaaatgaagtcagcagtgattgacttgagtttagcacatgtgagattttgagccaaacattaattatgtttctcctgagagactccattttcatagtatactagaacttgaattgtttctctggatgcaggtgtgacttgacatgattaaggcatattcttcttctaaaaaccagggccaaaaatgacttaccttcaattactttccatttgtacctatttttgagctttaacctttcatttctgttacccaaatcagagctatatccattgaccaaaccccctgaggctagagaaggtacaatacaagtccatgacagcagaaaaacagggaagtgttcatcaaggcatgaaggaaaacaagttgaattcaattggtatggaataacaagaataaatgagcacaggccagttgaaaaataataagcctgaaattattagctggaagtctaaaagtggctgtattttgaaagaaaagaaaaagaaaaagaaaatccaaaaagaaagttattgctttgttttattttatttatcatttgttgaataaagtaccaggtttgaagagaatgaacaaggaatatggaagactacaggattggacttaagggactggatctagcctcatattagctacttttccaaagattttcctacccttagcccagccaagttacaagcctaaaagaccttttgatcaaattatgcttgcatctgttgagaatattttcaagcttatggtaatgctgtgactatgttgagtgagagattgatcagcctgatacacttgagtgcatgagtgaataaacacatgtctgtgaggaatactcaagttactctccctaattgacagatttgaaagtaccatggaagctttgatatgaaatgattatactcagcatgatgaattctaggattgtggattgtggttttgtttgatcatagatccttgcttattctttgatgttctgtttgttgctgaggacaacaactattaaatctgggaattgtttgatgtgttgcaaacacatcttagtttcaggctagttttagattataatttagataaataagttaggaattagaataaaattagttagtttattattatatttaatttaatctcatttcatcaccatttgtgcattttagggcttaaagaaggagaattaaagccaaaggagggagaaaagcaaatctgaagtcccgcgcgggtcacgccagacctcgcgcgaaccgtgccacaagcaaaattagagcttctgtttcgaaagccccgcgcgatcagcgcgggactccacgcgatcagcgccacaaattcgaatcaacggcgcgagtagcgtcgcaagccgcaccatcagagccacggaatcgctgtttccttatttaacaagattcagttcgaaattggcacagaataagggcctagttactctaattaaatctatctataaataaaggcctctggactgaagaaaaaacacctacacaccattccacacctctctacacttctatacatcattctacaccattggaaggcaagaatcaaggctaggtcactgcagaataatgagttttttgacagctttggtttctttgaagcctatggcaggctaaaccttgtattgtgggaaggtcatgaactgatgtaaactcctctgtaacttgactggtattgaatgagaattcttattgttttattttactctgctctttattgtttaattcttatttagaactggtcattctatttagatgttgagggttaggatttgcaatggggacgttgggattctaatttctgaccttagtaaaataacagttgttcatcacctagggatagggatgcgtggctgcagaactttataatatagtcttttatatgcttaacttgatagatttcatcaaggaattgggtctttgattcaggttaaagggttaattcactaaggaattagggattaactagagtaggaaagatttattctccgagcaaaagaattcggaaacccttatgatatgttctctaaatgcttagtttgacagaatcgctaagggcttagggttctcgatcggattaaagggctgaatcgctagttatctaggatttacgaatataggagagatttgtcatttgtgatcaaatttgataacccagttaagtgaaagaggtagtgaacattagggattgtgcctgaccacaattgtttctttcattggtaatacttcaactattttactgtttattttatttcagttttctattcaaatcttcaacacacaactattatccaaaaatattttctttttacctccaatcacatagaattaatattactgtgaatttcaccccaatccctgaggagacgatactcatttacctattttattacttgaaacgatcggtgcacttgccgtattgtgcgattttcgcaacaacaatgcatcaagtttccatgtctctggcattaaatgtacttctttacaaaattcgaacagtttgtcatgaaagttggccaatagtattcgatcctcataaccctggtggccatggtcctttccccgaaatacaaacctcaaatccccttatgcaggtcgtggagaacattgttagcctggtcttggtcaaggcacttgagcaaaggtgaggagaaacctcttttatatagttcaccggccattagggtgtacttagcggcctgcattcttatctttctagctttgctcttgtcagctgggagtatctcatgcttcaaatagtcgagtatctcttttttccaatcccaaaggggcttcctccacttgtagacattcttttgttgagacgctgggttctagcactgaatgaagaataaaggttttaagttgtacatgcttaggggaggtagtcagtcaagctaactcgtcgaccttatcgttgactgttagctgttcgacaagcgcaccaaattgtccaagtaataaagaaatggtaagactgagtgtcgattccacaaagactttgcttgtactcagagttaatatatttctaattttaagggagcaacgaattgaatttgatatttttctaatcctaattccgaaacataaaattcaacataaataaagatagttaagcagagcacaataaagagataaaatacaaacacttatggatgagttatcggttgatgcagagttttgtgacatgttgggggctcaactcaccgaaactacccttgatgcaatattaaaggtttttcgctattcaacattatttccactctccttgatttactaagatattataacctttattcctcaagcgtaagaccctaaatcacttaatttcactcctaattcctcaagagttacattaactgatttgcattaataataaagatgataacctaggccaaacaaaaccactttatccctagacatgatattgtttagaagtgttttttagttccaaggcaataactattttttgatatattaaaacctaaaacaaagcatcaaaatgggtgatcaaaccactaacgtgaataaagctcagaaaaataacaataatatgaagataacattaaatagatagttagaatcattacatcaagagtgttcggttgtcgagctcccaacaatggatgatttagcctcccatggtcatgagaggcttacaaatacaaaaaggagaaagatgaatggaagaaaatagaagaaaaatggaagaagggtggaggaaggggccccaagtgagtggggttttccctctttttcgtgccctagctctattctgtccaaccccctgagtgggtagtgttctttcctttttatacttcataacgcgcactatcaggtttttcagaattggttacaccctgagtcggcctgcaactgagcctgcatttgtgcactgagtgagcctacatgggcatgctgagcttgcatgtgcgctctaagcgagccactccagatcttcaatccatcttccatgtctctgttgtatcactctctacaaaaaaaaatacaacgaacacactataaatcaactaattttagcatctactagataaaagcttagaagaagctaaatttatacgttttactcacaaaagaagcattaaaagagggaaaagaagataattgctatgtgatttacacgtaacatttatgtattcatagcaattatcaaactcccccaaatttgaagctttgcttgtcctcaagcaaaagtaagcaaatgttaaactaagttagatcaatgacaatgtcaaggatgtaaccaaatcacaaaaactgagataattgcatacttccaaaacaattttaatattcaatccccaagttcacactaactatggttttatgatggaatcatgcaaagaatgcacttaaatagtgaaaaaggttagcaagactgacaaatatcaaagaaagatcaacctgtccttcactcctcagaaggctagtgtttcactcaagcacacaggtggttcggtcatcaatgattcattcaatacaattgaaatcacaattgttagctttgcacatcatctcattcaatgcaatcacacacacaacatggatcactaaggactttattaggcttgaaacatggttgggctacaaagaaatcatggttttctcataattcaaacaatcaagttataggaaagcattcacttattccttacttgcgttagaggaaccattttttcttgttctgtcaaccttatttaacttgccactattaatagcacatagaggttttcttaactttggtttacttttactttatatatatatatatatatatatatatatatatacacacacacacacacacacaccaaaggcacattgtcattcttgtcctctgtgtgcttcttactcacatccctgcaaaagagttttctaaaagacattcccccaaatttggaacaattttgtcttgatccctaaatgatgctctcctataacctaaggtatggtaacatagttccatatgcttttcagttcaaggttcaagaacaatattccttctcagtttaggctcaagaggggtacaagagattcaacattcattatcaacagggttggttttttggccaagtggctaaaattaaattaacaaaaaggccttgatcatatccactcaaacaattcaagactcatgcaaaactagaaagcaaaatcaatagttctctcatagttacgatgcatacaactcacacggtatcgtgaagcataaaacctctctttcacaagattttctgtcatgcaagttaaccgactcactcacgcacatttaattcataaaaccatcaatcaacaacaatgcgtgctcactcaagaattgaaatttgaaatttcacacaaatgcaattctcagtcatgcatatgatttaccccgcatgcccacaaaaattgttacccaaaatgtgtgaaccaaaaagcactatctatcatgcataggtaaatccaaagtaaaaagcagaatataaagtgtctagaacatgataaaataacaaacagagcataaaatgaaaagcataaaatgtcctatgaagaacatggcctcagtcctgtaacggccatgggtcccatgttccctgagctgctgagatatctgccaagtaatcatcatcatcagcagcagcaacatcctcttcagtaggttcggatccatcaacatcactcccccccctccgatagaggaagttctgtcccagaccaagtgacgcgggagaggaagatctatggcgacatcaccggttgctggagagatagctggtggaaacgatgttaagctcgtggcatgactagaaggaggaccctctacgttttctcgaggtcatctgcaaaaaagacaattaaaaagcaagatatgtaacaccccaaattttggaaccacagccaattactggggtaaaatgataagtagaggcagtgcggaaggatttggaaaaaatgacgaaaatacccttgggcatttcaaaaatgaccaaattgccctaggaagtttagcaagacatcttgaggaaagaaatcctataaaaattcttagatgctttagaaaagaccaagaatacctctagggtaacaattacagagatgtcttgaacattttttagaaatgacgattttacccctagggtgaagggtaaaattaccaaaatgcccctaggtcaaaactgactaagatgactttagaaaattatgggaacctgagtattggataaaatgcctttagacaacaaattatcaacatggttggtggtagaaaactctaaattgtgatttctagaaattttgaaagatattctgaaaagagctcaatctagacaactacaagtatcagaaaattataagaaaagtgtaaatataatctatggagttttctcttaattatggaaggaataggttgcctaaataagttagtttagtaattttaataattagagtcaatatgaaccaatgagaaaatagaattttagtattacatgaaataaaaggaaaattagattaatttggaaatttagattaagccttgaccatatgatgcaagatcaatggaggaaaacttgtagaaaagtcaagaatgatcacatggatggataaggagtctagacattccattggtccaagtcaaaagtagcaattaatgcttggaatcttttagaaaataaaacttagcacaaaaggcaagtatcatacgtatgaaaagagcaaatggaatgccactatatttgagaagtgaacgtgcacaacaagcttgggtcaaggaagtgaagaaaattcaagaacaaagacacttggaagcaaaccatttcttagccaattaaaagtaagcacatgtaaaatagctataattaccaaggaaagatatttgcattcataattgaaaggaaaccgtaaacaagctgaaccaaggggagggtatatgtgcaaaagaaggaagaagaatgtggaaaaagccacttggacggtgcaaaagaattagccaataagaaggaagctagctttagatattttcaagcttaattaagactataaaaaggcatatggaccgaaactttgggctgtccttaaggaaattcagccatgccaaaaccatccctagagcctttccatttcattctaccttttacctaaatcaaaagcaaaggcttacatccttggaacctcacgtgaatattaaaaacactaggaggaaggaattattcaactttaaagaaggaaaagttgtcgaaagaataaagaaaacaaggaggagggctgatcaaaaagcttcaggaaggcaaaggtatggggagtttgtgataatcaaagtttgaataagatgtatgtcaaaattcttatatgattttataaagaactaaatttggtattctaggtgtttaataaattgtcttaaaagagcttgaatggttagttgttaagtaacttggttttaaattaaggaataagtcttgaataaataacttgaatctaatttaaggaggaaagctaaaagtgattaagagtagaagtagaatagctatctttagaaaaatagttgtttgaaactatagtggctggctatcactttaatgatgaccgaaattcacccatgcttctttaagtatctatatttaatttgattggttggaaacatgtatagtatattggattctatggaaaattaggaaataaagttggttatcatgtgtttggtaaaaataattcaaaagaagataaagatggtttaagtgttgatattgaaagaaatgtttgtaaacatgtgttgttgagtgtttctattaaaacttatagaatttgtgtattacttggtgattcataaatcttgatgagctttgagtgatgtatggtgaatcttgatgaattttgagtatcaagttgagtggtgtgttgtgttgatgtgatgagatgacctaagtgttgagaagatgaaatacacagagattatgtgttgaatgattttataaagttaatatgttgcttatgaacccacatgtattttaagtggttttatgatgagaaaggagtaaagatattatgttgagtttgagatgtatgtgatgagaaaaagaataattaaaagatgtgataaaataaattattcatgcattgtcatacgcatatgcctggcgggggttaatccgtggagttgatgccttgcgagggttaatccgtggagatgtgtgtcagatagttagaggaactgagtatgagtgttcagacagtgaggagtctgagttggggggtgcttcggcagtggggaactcacgccacccatgatgatcacatgtagtgtgggtgactttcctgtgcaccactatgacaccctgactgatcatgcaagttctggaccagtgattggagctatctgactgtggccactgatgatgatgatttaataataacctgagatctcagtcatgcatcatataaaaagatgagcatgcagtctatacattacatgatgagtatgtggaatatctgttgatgagtaaattgtatgacttaattcgtgtgttgtatagatgaagataatttaattctgtgggcaaatactctgtgttgttattttataaatatttacgtatgtatgctgttatatatgtttttattcaaactatgtctgtcataaacttacccgagttgtgtctgtgattgacacctgtgatgaccccaatatatttggacgagcagatgaacaggaaagcatgaactgtaaatgaaggatgatgaagaagttttgatgaactgtttgttgtagtctgtaattttgtggcatgtaattcgtagtaaaacgtctgtgtattattttggataactgtagctggactgtatcttattattattataattaaaccgtggtgaggaagaactgtgtacgttacaaacgaatcatttgcaagcgaagcaaaaagaattttcgtgaaaaatttataactaaaaacgttatagtacagaaaggacatgaatttccatataaaaataatcaagcacgagtgagtagatgcgcactgagtgcaccccaaaagaaagcattaacccaaaaattctaggctaaatgtgagacggcgtgcttggcccatcacctgctgaatttactcgcacttagctcgatgatattacgttgtcgacacgcaccaaaacaatttaactatgttaattctatagcacaggattaacctaggtcgactcagagacacaatcaatatggttctagcttcaatttactaataacagtgaggggggaattttatcaaacagtttatgtgcttaagtaaaacttgcaaaaatgtaaattaaaattaaagagcaacacagaaactaacagaattcaaaagaagtgatgtaaaagagaattaaagcatgaattcaattcacctcaccaagcaatttgaatcatcattgttctcagaaatttatcctattatgaaagttcattcaatctcattagaagcaactcaatcgacttaacccctaaattgattgaaaccacaaccctaactgaaatatcatccaactaatcagtgattaatattcgaaattaggaaatgaatccataacctaatccgttttcaatcctaaacacattcataatcatgaaaacagaatagcaattgaagaagaagatgaacattcacatagaatttgaaataccaaaccagaactcaaattctccttgtgcttgggttggttccttggattgagtgaggatttagccttccatgatcatcatcagtgaaaggcccttggaattattgcacaaaaatggaagaacagaaaaacgaaaatgaagaacaagcaagaacagttgagagaaaatgagaacaagggttttgatcctaaaaacctaaaagaagaaaatgtaaaactgattttattaaatgaaattgtgtgtgtaatctatccaatgtcactaataagtagtgactaagtctgaagaaaagaatgggccatcaacaaaatccatcgattctaattatttactatttacaaccataaaattcaaatttgcagcccaaaattacaagtgcagaggtgctaacttcgaagctcaaaattaccctcaaaatgatagaattggcctcgagctatttctggcaaacttgtaggtctttttgttatctttccaaagactcctagaacgctccatttggagatcggtagcactctataggccctgcacaagtcagatacattaagtgagcaaaaatccaaaaatacgctacaattagcaattaagcccacttacttgtctaggtcaaaaactgaattagaatgaaaaaataaaagttcaaaagaggtcaaataagctaagaatgatagacaaaatttaactaaaagcactctatcactcgacaatgcacacttagcacaattattttaagttgctaaatagagagttacatgtgcgctaatactctggaacaaaatataagcaaaaataaaaagtgacaatttttttttttgaaaatgggcgttgagcctccactttgcgcgctaagcaagcctgagtctgtgcgctaagcctacacctgtacgctgagcccaattcacgtacccaagacttatttgggttgagcgcacatggcgcgctgagccaacactttgcgcgctaagcccacacttgcacgctagcgagatctacaagttaatttttttctgcagaatccgcttagcgagcccttgcgcattgagtgagccctacgcgttgagcgagccataaaaatctggtaacaaaaatcaaacaacaaacataagacaaaaagcatcaacactcatttacacacatatcaaccaacataaatattaagaaagtcacaacagcagaaaaaaggttagaaatactaggttgcctcccaataaacacttatttaatgtcactagcttgacgggccaaatgcctttaaggtggcatgaaggtcacatcaaacacatcttccttgcattttcgcttcttagctagaaactcgatgaacatcatgtatccatgaagctccttccatatcattgcaagggatgtattggtgatcacagaaaaaatggcactcaaggatttgtcacattttccatgcctttcttccttgccaatcaattgatgaggagaggtattgacttggagagggctttcttgttgaatttcaacatgtgagcacttctcccgttgttgttgtgttccctcctcacttttctcctttttttcttcatctttttcctgcgtatcatgctcttctacaagactctcctcatgtgttgtgacttctacaaaattttcttgcattatgaccgaaggatatgtgtcagccatttcttccgctagcttaccaatttgaatcgccatattttgaactgaattttgattggcgttgaagctagcttgggaagtttccatgagatgcatcaacatattttcaagattagagagtctttcttcttcatactgattgtaagggtgcaatcttactcccacccagaattttccatggagtaaggatgacaatcatcattgacatgatctcctccacaaacatcacaatttataggctgtgggcgactcacccctaattgtctgagcatactacttcaaatatcttccaagggtcaggttcttcaaaggttccaccctacaagcaaagactcacaagaaaaagatacttttctcttttctaattttttttctttttcttcttttacttaacacaattgatataacacaaaaaattagaaacaaaagaatttatgcttaaacttaggatatacaaactaccaagtacaatgaactaattcctcagcaaccgccaaaaacttgttaacggtttggcaagcacaccgaattgtccaagtaataaagaaatggtaagactgagcatcaattccacttagactttgcttgaactcagagttaatatatttctaattttaagcggacaacaaattgaatttgatatttttctaatcctaatgtcgaaacataaaattcaacataaatatagttaagcaaagcacaataaagagatagaatacaaacacctatgggtgagttgtcagttgatgtagagttttgtgacatgttgggggctcatctcaccgaaactacccttgatgcaatattaaaggttttttgctattcaacattatttccactcaccttcatttactaagatattctaaccttgattcctcaagcgtaagaccttaaatcgcttaatttcactcctaattcctcaagagttacattaaccgatttgcattaataataaagatgataacctaggccaaacaaaaccactctatccctagacatgatattgtttagaagtgtttttcagttctaaggcaataaccattttccaatatattaaaacctataacaaattatgcaaatgggtgatcaaaccactaacatgaataaagctcagaaaaacaacaataatatgaagataacattaaatagatagttagaatcattacatcaagagtgtttggttgtcgagctccgaacaatggatgatttagccctccatggtcatgagatgcttacaaatacaaaaaggagcaagatgaatggaagaaaatggaagaaatatggaagaagggtggaggaagggggccccaagtgagtgggttttcccatctttttcgtgccctagctctattatgtccaaccccctgagtgggcagtgtttttcctttttatatttcaaaatacgcactatcaggtttttcagaattggttatgcgttgagccagcccttttcgcgctgagttggcttgcatatacgtgctgatatgtggctcacaaatgaaggattaaaagagggaaaagaagataattgatatgcgatttaaatgtaacatttacgtttgcatagcaattatcattgacctctcggcttatataagttacttgcacttcctcaaattctcccttaagcttctcaaacatgtggtagtattttaggagttgggggtctcagtttgaaacaccttgttgatctgctcggtggcaatcttagagtcacttcggcaccagactcttttagagccaacctttttggcgagccttaaacctgtatggagggcttcatatttcatatgattgtggatttgaagctgaagcatagcgattagaccatagccatattgttgggtccttccaaaataaccctgactcagctcccattttggttggaggagccgtctatgtgcatcatccaccatttctactcaaactatggtagtgggggatagaactcattgatgaaatagtccagtacctgtacccggatagtacctctccactcgtaggcaatattatattctaagagctcaattgaccatgtcatcattcatccagccaactcgggcttacgtagtatcttggctatggggcaatcagtctgaatagtgactttatggctctaaatgcattgttggaggtggcaagcggcattgaccactgcgagggctaccttttccatcaattgatacctcgtctatgaatcttgtagtacccggcttacaaagtatttcggtatcttctcactttcttcctcttgcaccaatgtcacgcttatggcctcgactgggaccaaaaggtaaaatcaatgtttggtcagtgtctgattttgacataatgggcggtgttgttgccagtgttacctttatttatcaaaaaggtttcttcacaatcctcattttagacaaagttattggcctttttgaggaggttcataatgggcctagccttgttgacaattcttggtaaaaaccttgacaaggaggctatcttgttggctagtcactgggcctctttaatacattctgaggactccttatatccaagatggcttggcatttgtccgggttggcaagtattcctcgatgggtaagcatgaaacccaaaacaatttcctccttctaccctgaagacacagttctcagggttcatcctcatgttgtatttcctgagttggtcgaagacttcttctagatttgtaaagtgggttttcaagttgttggatttgaccagcatatcttccttatagactttcaggttttgtttgagctgaccttggaaaactttgtccattaagcattgatatgtggctccgacattctttaacctgaatggcgtgactttttaacaaaattttgcagattcggtgatgaatattattttctcctaacctttagccatccttatctgattgtggccagaatatgcatttaggaaacttaacaccctatgtctgaccgctccatcaaccagttggtcgatctatgggtgtgttatgcgtccttggggcatgcccagttcaaatctttgtagtccatgcgcatcctccacttcccgtttgatttttagaccatgaccacattggagaggccagtagagtagtcaatctctcagatgaacccagcactgctcaacacctctcttcacccatctttctcttcctctaggtgatcggcttggtgtcttcacatatgtacaacctatgacaatagaagcttgggtcgataccaggcatgtctattaaggaccaggcaaacaagtcgatgtgttctcggatgactcattgtatccgactattgtcatcctcgggaaactaactccccaactgagtgatctgtccttccctaggcttcagctggaaagtggaagtctcttcaactgggcttacttggttgtcatcattggttctaggttcaagctcaagtccttctacctcttcgacctcaattccaacttccacatgctggacggcttctagggttccttcccttgtgtgagagtgtagcttaaggttggccatgtaacattcccggggcatccattggtcagcgtgcacaattataatggtctagacgtctgacgagaattccaccgcgatatcaggtgtaacaccccgtaggcctccgacgtgttatcattaataatatcatattagcgcataaaaaccaaattatatacattagaggaagcatagaatcgttttcttgatacattatgtatggaatcacctatataaaatcgtgtcacaaatatacagaacaataagccacgcccctgctgatccaatttatcaaatctaacataaacaagacagataacagagttttaggcagagtaacaacaaaatatacatacatatactcaggggaaagtctcatatacatcacatcaaagttctgtacatttatatacataacagtttcgcaccacacacggtgctacaaaagaatatcaacccacagaaggggtatacagaactaaactcaaaacaaatcaaaatggagccttcaagctctccatgcggctcctcagccaagcagcctagtctctgatgggcctcttgccctgagactgttcttctcttccagaaggttcacctgaaaccacataaccccacacggggtgagataacatatctcagtaagcttaggatccatggaggaatctcctccaccctggcccactatcataatacatatgcacacacatcacaatcaaatggcccactggcctagccctctggctttctcaatcacacagcatatcatacaaggtgactacacatatcagagcaggaggaaaccatctcctgtaatagggaggaaaccatctcccaggaataaagtcaccaaataggaggaaaccatctcctatatcaacatatcaggctaggaggaaaccatctcctagaatgggaggaaaccatctcccagtgtgaggccggaacttacacctgtgtcatcccaccggacgctaccctttacggggatgcacatatatggtacctccgagaatagcaggaatccatctgaactattcccttggtctaggggatcatcatcaccccgggatcatcatcacccatgagccaaccatactaggaggaaaccatctcctagggaggtccatatctatctattggccaatagatctatctcaatcacaatcacagtacaatcacagcatatatccatcatatctcaagcacagaggcatatattcatcaccacaagaatgcagataatcatgcatgcattatgaaatgaccaccactcccccggagtgtggtgtggcacacaagatgggaatcatccccagggacactgaacttacctggaacaatatcactctgtggtctagtccctgctctgtggctcccgccaccgataatctcagaatcaacgcctatacaaggcatatacagtttcatatcaatattcaaaccacaggcatcaatcacagataaaacatagcataattcccctatcctatggttcaaacacgctcagcctatattaggctgctctcagaccatacaaggtccatctgggctgagtaccaacctatgaatcaatgtagattcaatgcctcataagcatggcataatctcatcagccccaacaactcacagtatcattggaatggttcaagcctcgcctaaggctccattccattagccccacaggctcaatacaacctatacaaggctctggtttaacagatggccagtacaagtgaccataacacaggccacacaggcaacacagaaccaaaaatccaaagtcatcagaatcaaaaactgaaagctattccttcatctattcatcgttctaaacaagtttctcaactggacccttggctaattctagtcccatatcagtgtgggtcacaaaactcagaaaaccccaaaatcacagagacccaagagaacttgaatttcttacctcaatggcgtcccaggagacctcagaactgctttcccaagcactggtgcctatctcctgccttggtctcgcctattctcaagttctcagaaggtttctcacttgagaatccaaactctcactcaaatggggtttaaaacgaaaggatgaaggattatagctttctgaaggtttctctcactatccaaggtcacagggaggtgattaggactccaaacagagtcctaggaagcttggtacaagctctaatggaggctgggtcgtggagaagaagagggaatagtgttttcccttccaaaacgcgatttccctttaaagagtcagcctgcccgagctccggcgcgatccgcgccacctcccgtgccatccgcgccacaatgtcggtgctccggcgctaaccgcgccaaccccacaccatcagcgccaacttccccgagacctgtggcgccacctgccccacctctggcgccatcagcgtgaattttcagagaaaactgattttccagggcacttctggcgttatcagcacggccctcggcgctacccgtgccacctctaaagcaaatggcgctatccgcgccaaccttggcgctggccgcgtggaaatccagagaaaatggattttccaggccacttcccgcgctaaccgcgcgacctctggcgcgactcgcgctggatggaaaacctctggcgcccctggcgccacattgacgctctcagcgtcagcttccaaagggtctggagcgatcagcgccaaccctggcgccatccgcgcggcaccctaaacggggttttctcaagtgaatccccgcgcgacagcgcagggtcaagcgccaagaaaataagggtctttacattaggggttgacacaatcgtgctaagggcattgaggaagggatgaccgaggagtatgttgtatgatgtgtgggcctccactatcacgtatcgtatctttaacttatctagattggcccttcataccctaacttggtgtagagctagagcagcccttcgtccctacctattctctagcaaaagcgaacagggggtcatcgtgggaaaggatttcaaactcgggtatgtccatctatttgaaagtttttcaagaaaagatgtcggtcaagctcccttgatctacaagggtcttcttgacgatacagttggctatctccacgctaataaccattggttcgttctgcactaggtcaattgccttgaagtcctcggttgtgaaggttataggcggcatgttcggtactcggtgctaggagatcatgttgatggatcggacctgctgaaggtgtctctttcgtgtggaggcagtggccccaatcccaacgaagccttcaactatagtgtttatgacccaccttggtggatcaaggggtctttcttctctctgcatggagtggctttggctcccccgcctttctaactgccctgcatgttctcaatctcttcctcgactaggttcaggtttgtgtcttccctcgggcttgtatgactacggcttattgacaaaatcttttaggtggtcgagcttgatgagctcctcatcttgtctttcaaggcactacactcctatgtcgagtggccacgattgcggtggtactgacaaagctttgagtacttggcctttggtggggtgttggctctcttgggcatgtccaaaatgttgacagctaaggcctgatctaaaatgtgggatttgttggtggtaagatgagtgtattaggtgatcgcggctctcatggcgatcggtccctcctcccttcattacaaaccttgttggagtcgagcttgtcattatctttcttggccaacacggtatcagcccgcacctagtttcgatactcgtccaactcctccatctacatgtacttagtcgctctcgttcgcaactcggcaagatcagctgtcgacttcttgcataggttatttacaaaaagtcccactcgtaatgtcgttatcaagtggtgcatagccactattgggtccaggtttcaaatattcaattcaacctttcctaagtgttccatgaaggtccataatggctctttctactcatttcctatattgacgagggacacagatattagatggtgtgccgacttatggcaaactgtgtcccaaagcgggtcgtcagggtgtcgaacgagtccacagagttgggggcattcgtgtaaaccagtgaaaggcctgccccttcaataacatcgggaataatcagcaaagtatcacgtcattggtgttatataggctcacctagataatgtacacgtccaggtgttcgtctggtccgtggtgccatcatacttatcaatagtcaagttctttcaattggaaggaagagtcacctccatgatgctagagacgaagggattcttgaactataatagttgtcttcttagggtattgaaggtcgggggagcatcatttgagcacacactcggattaatggctttgggcaggccaattgcggttgattcaacctctcctccttcaggcatattagcctcaggttgccgcaacttgtgcacctcctggaggtgagcattctcacgtcgaagggcgacgatttcctcagcatggtgtttctgcatctcgaagacctaagcatgtagtctcctcaccacttaagacaagtcaatctgatcttctacccgagtgtcttcgttgtggtgattgttagttggttgctccattgttgttgtgtttgttccaactctggttatagccaaaaattcttgtggttaggatatgcgagtaacacagtgggcaccaaaattttcctatcacaaatggaacggatgcttgtccttctatcaaagggactcttactgtgtcaagggtcttctgtttgatgttccttttcgaagtcttaggagtgttagtatttggcagagcgtaggggggtacccacaaaaggcactctgatgctcaagtgagggttcgacttagagctattaatgatacatagtgagtatgtgagaataaatcagtccttttacctgggagttcacccttttttatactaacattgcttggcttgaggtctgtgcgtctatcacatcatgattaccaattgagcaatattcatcctaatcatgtttaggcacttctaatcaagtgatcacccttaagcgggcttagtggtaataatcatggccgaatggtgctagttgtttgcatatattgaaggccgagatgtataggtacgtggccgaagggtgtgttcagtttgagtgtgtcaggtgtcccttccgcctgaccaaatactttatcttgtattttaattcctagaatattttttatttatgcttaattttatttttttattggatattatactatgcatataaatttaattatatagatgacacaaagaatcgaagtatcgagaaatatcaataaaagggagcaagaccaacaactttaggctgtgatcaatttaaaaaaacgttttttagtgtttgtaaataaatagttataaaaatattatattatttttattttctattaatagaatcaataatgtgagcacatgaatcaattcgacagcatcctctgaatgtgattgaacctcgactgcatgaaagcctccgttgctaatctattgtttattgttagaacaaataaacaatgatatgttttccttatatttaagattgattatatatttatattaattgtttgtcaagtgttcaaaaaatcctaaagtagaaatatttcttttaccaatattttatagaagcaatcgtatatgttgttttattaatgataagacttaagtgcgatattatattgagtttgttctccaactaaaataaaaattgtatttcaatgacttgtacaatcaagatttacgcatgctattaaagtaaacaccaattctaatcagaaaaccacagtacatatactcaaaaaaattccatgcaacttgagcaaggacattttgagtagcaacttttaatttctttattgcctcgacaagaggtttataaaatgacactcatgacactttcatatcaaaccaagctcagcaagaacaactctctttctgaattctaactaaaactaattctttctgctcctcataaacctccttttgttttatcctctcgatggtcacactaatccttcatagaatcgttggtatattttgatgtgaaacaataatttttcaagtttgagtttgaacctaaatgagaattcttctgtttctaggaaactagaatagtactcgtgctttgcacgatggacaattcaattttattaaaaatttagccaatacatcggcaacttgattgacttcaagataaatgtgccttcaagaaaaagtcccattcctctgcacaatttctctaatagagtggaccatctgttagtggacaagggaattagtacaaccttcctcagtcactttttttttatagataaatattaattgttaattattaattttttgttagtagaaaaatcgaacccacaaattttctttccttctcttctccttttaccaccaaatcaatctataactcctccctcaatcaacttgatggttgttttagagtcagattcattcaacaatcaaatcattaaagtctctaaaccaacacacacaccccaccctgaaaaattaaacattttgagcatcaagacatctacgggtaatccgataatagcccaaacattatgatttgcataggtaagtgtctttcttcatatctatgctatcttgtttggatggtgccatggtgagttttctttcaatctccttcctataaaagtaccatcttgagccatcctctggcttctcttaggagtatctttgagaaataccttgacaagttccatgatgacagacatcaccaaccaacaatccagcatccaccatgtgaagaaggtcatcagttttgatgtgtacctgtattaacatttcagaacgtaatgtaatgatcacgccactaatatcaagtgttccctgtagtaaaagggcaattcaagtgcccaaggagaaattgatgataacacgccaaatttcatgtgtttctactttcttggtcgttgcttctaccaagtagttaagtatgaattgtagcttcttcttgacttttgatggctctagttatttttgtatatctttcaatcaatgtatttttatttttattttgacaattttcttaaatgatatgcacttgtattgttcattccaaacaagaagccttagtaaagcacttttttatccattctattctatataatttcccttttttctcgaaaagtttatggtttgaaccatgttttctaacaccttctctaaagtatatgatatttctactcatttagaaagtgattcacttattttcaactatatcatgatttaactatggcctcaattacctttaattctactgctgtcttcttttattttttcatgctctgcttatctttttatgcacttattttttgtgttaatactgatggatttagaccggcgaatttcaattattgttggcgaaaaataaatggttttggaaaaacaaatggtgaactattgttttgaaattgtggttggatgattcccagcacatatttcaagtaattttgcaaatttttacaaatttgtaaaaaaaaaaaaaatatgcaatactaacaagtcaaactccggcattaattacaaaacctaatcactgcctaacctatcgccaacccgttgaccctttctactttaaatatcaaattgaaatgcaacccactctaaacatttgtttttatcccctaacagcttgtaagttttcaagtcaacaataattaaattaccatacaaaacctgtgacattagcacaggaagaatattgcgaacgttaacaaaatattgaactactaaagtaacgtcttaaattcaccaaagtaacctcttaacattaaagcatcaaatttatatgataaaaagtactagagagtaaattaagatgttatacttaaaatcaccaatttaaatgctagcacactttctgccatcactaaatatgcttatttcatttccaaaactaatgggacctcatgaatttcagccaataatattctgttttaaaagtgtgttaaagtgtgtgttgtcagcactcctctacgtgttacaatgatcgtgaagaaaaaagatcagacacagcatattttctcttagatgcagacaaaatgcaggtttagcaaatcaaagagtagcataacaagaaggaaaaactactaattctttcaccatcaaaatgactcaagaacacaaaactaaatatcattccagaactttgaagttgcacattactaatattcttaacaaagacctgccaaaattgtatgataattttaaaataaggtttgaaaacaaatgaaaagtgtaaactgctttcaactctcagtctgctctctcagcctccgaatggtgctccggacagtgacagcactggcagtactgtcaagaagaaaatgcacaaacaaatcatatcttcaaccacaataaaaaagaaaacaattaactgtaaaatacagagtgaaggaagattcttacttcaatgtgtaagcacctccagccttcacttttccacaatctttgcagccccaaatacccacagccttcctcttaacagcgtactgagcaaacaaacatatcattaatagttgatcttaggccaaagttaatttcaacaagtttgagccttaaaattaaaccctatatgtttttatgatgagttcataacctcaaataacaatttcaggttatcagaatcaagtctaatgccttatattcttttaaaaactataagtttgttaaacaattatgtattaatagacaaacttattgactgaaagaatactactttgtacaacatgatattacatattgatattgaaataaattgtaacatattcctttatttataattctatacataatattaagaatttaagattgatataactggtgtgtaacacgatcttatctcatagactcgtattattgggtgtgattgagattgagatcagattcaaatgaataactcaatcaacatttttggactgataaacacatactcatcccacaaacaatcccatagccaatagtgaaccccaaaaacattagaaagaaaagaaaaaaaaaaagaatatacctttccacagaactcacagaagaatttactgtgctgactaacttccatcttcttgatttgcttccttaaactagcaccatatcgggtgcctgtaatttgacacagcataaacatcagttatcacctcgtttttctagacacagaataaaaaataaagtaaatttgtctctaaccggtaaaggggcatcaacatcatcaacaacaacaacaagccttgatttaatttgacatagaccatagtctagcattcaaagttcctttagaataaacaccgaaacaaaaataaaatacccaaaagattcaacaaagaatggaaccaactacgtaccgtattttccaacaataccggccttcttggttctcttggtctggtcacatgcacaaaaaataaataaataaataaataatgttaaaatctcgaattagaagaaaccttaaaattccataaatacataagaaatagacagagaaagagacagcaccatttttgagtggtaagagaagctgtatcgctgctacaagttagaggcgcggctgctgaagttgaaccgtgaacgagggtttgttgcctgagtgagaagagtaacaacgcttttgagggtaagtagaatgatgggcctattgcgaacccatgaataagcccataccaatcaattatttaatgtactcattatttgcttggtgcacctccaaaccttccaatatcccatttttacccttcttcttcctctctcccacctccctaaaccaccacatctgcgcgacctccaccactcacctcctctttcctccacgctgccagccttccacctcgtcaccaccaagatccgcacgggcaaaatgaagaaggaaaggttgaatgaggtgattccttatggattgtgtaatatgtagcgtatatgttgttacggattgatcaatccataatatagataagaattttacatttatatgacaaagtctgcagggtgcaatgtgtgaaatagagaaaaggaagaataaggtgtggtagtgttagatcaatgataactaggggcagcacgaccctgggaggatgggagagtaagaaagaagcaaaactagaatagggaagaaggcaacagcgctagaacaaggaaagttagaggtgctgaggttcagggtaaaagggtccattcagtgctttattatttctaatgagatgtaccaagcaaaaatcgggtacattaagtaatatcccacataccagcttctaaacagaccaggacaattatcatattgatgtttaccttaaaaaaacacgtcatggattcagaggaaaaatgaaaaggaatttagttagaagcaaaagtgaatgacagattcgaacgagacatgctttgttttgttataccttcttagtttatagtgtatttagatgagtgttaacaaaattgattttaaaaaaataattttggttggttaaaattaattttaaaataatgtgatttatgtatgaatgttttttattataaaattaagttagaaatacaagtataaaattctggtcttgtgtgtgtgagtcatcttaacttgtatgtccaaataagatgggatatcaattgcctatgttgttacatagaattctagtcatctttgagaaattaattcatattttaacggttgagtacgtcttcagcataattacttggagtcaattaagttgtgcattaagtgagactttatgttcgatctttcttaatttacttcatatatgctttggtgattggttgaattttgaacgagaattcaatattttgggctgttcgtttctttgaaatttttaaatacttaatttacacaaattttctttatagtaaaattttaaatctaacacatcgtaaagacttatgtatagtgtcttaagtcttgagcaatgcaaaatcattttttatcataataaatcttctctttttcaaaaaaaaaattactgataaatttagaatatttaatagcataaaacaacagagctgtcaagttgcagaattttttcataatgattcaggttaggtgtttctttgattgtccaaagcccacaatgtctcattagtcacgttagaattttgtcttgatgatattttgcgttgtgtaactacgttaaaaatagtatgtttaacatcctgtgtgcaaaaagttccagataagtaattttacatcttaagcttagtcttagtcacgagttagtgaaaatagtttcttggttgacagttatattgagtcttgtttaatgaggttaactgtaattaatgtgtatgaagtttcttatctggtaaaatacagggtgtgaagttggataatggttaatgactaatttaaagggattcaatgtcaagtagggtgaggtatatagcacgtaccttaagggtatatattgctttgctctatcaaaaatttatcctctttaatataattttagtataaatataaaaatttaaaattatttatttttagtataaatatatgctttaaaaatatttgttttattataacaatatgtttcagtttttatttttaatttaatttattttttattttattttttttaattttttaattttttttaacggatgcttcttataaatatacttgtaagtatatgcatacacatgtataaacatatagacatatatatttaaaataaaaagacattacaaatatatttaaaaatataataatataagaatttgtaaattgaacttaaacctaaaattcgtgaagagtatggattattatactcaatggcagagccactttataaccagcaatgatcatgacactagctaatttttaattttttttaataattatatatacttatataattaattaagattaaaaataaaatttaacactatctaaatttttggagtagtgcaagtgaaatggtgtggtgtatctctctattagagatggcagtttatttttttttcaatttgaattgaagcaggatgtgacggagaacgtactgaattaaagcagtctctccttagtctcctacttttcagttttttgttttcctccctccactccatgagaccacgaccactccactctcttttctccctccagtcccagtctccctccactccactctcctctctggctccctcacctcacgaagtcacggtcagtcggtcacggcctcccttccagcagccagtatcaagctcctctttcactcagattgttgcgtcggtctccctccattctcctccctcacctcacggtcattggttacaccgtcacggcctctccctcccagcatcaagctctcagatcgccgatctacctcatctcacggtcacgggttagtggtcacggtcatgtggttgagttgtttgttcatattatttttgctccttttctttttgccttttgattttctttgagaaaactgaaaagagagaacgagtagtgagcaataagagaggtgagaatgttgatagacttgttgggttgtatgcagaaatgttaaatcctttgtttgttgtgtgcaataagagaggtgagaatggtcaatgttgaaatgttgaatcctctgtttgtgtgaatgtcgagaactttgacactcacctgcaaagtgcattggcaaaacaattagtaattaatttgttgtaacactaaattattagttaattaaatgaaacaaagagaaaatgtcataattttattgtgggggaatgagattattgatggattggaactatatgaagctagactaaaacagagagaaactcatttgattacttgcttatttaatggttgttattctgtggactatgaagatcctagttttgacatgtaggttgaaaaagtataggcaaggataaatagaaaagtatagatgtgttctttaaaaagaaagtagtctctgaacgtgaatcaagtgatgctctttcaaacataatttctgaaagtgatgcaccttctcatgagcaaactccttcaaagtgtcatagaattaaacatactgatgacattattacagttaaaaataaattttttgaacgtgatccaagcaaacataagccaatttgggagtattcagctaatgaagtcaatgtgatacggagagcttatttaatagttaggccatatcaacctcaatgcacctatcctttttcaaaggaaaagcatccttgacgttttcaagcttcttggtttaaagaattttattattaacttgagtattcaccttctatagatgttgtgttttgtttaccatgctatcttttcactacaaaggtcggtgggcaacatggttgggatgcattcgccatcaaaggttttaatggttggaatagagttcatactggaaagtattgtgcttttctaagtcacatgggagatgattcttgttcacaacatactaatgcactcatctcatgtgtagacttaatgaatcagtcttgtcatattgataaatttatgcatgctcaaaacttccaacaaattgaaagcaataggttgcatgttaagacttcaattgatgttgttcgttggcttgcttttcaaggatgtgcttttagaagacatgatgagactattaatgcaagaaatagtgacaattttattgaaatgatcaaacttttggcatctttcaatgaaaaagttgttaatgttgttctacagaatgctccattgacagccaagtatacctcacctcaaatacaaaaggagattttatatgtcctagcaaacaaagtacgaaaacagattcgcaaagatattggggactttaagttttgtattattgtggataaagcatatgatgaatccaaaagggaaaatatggctcttgtcttgagatttgttgacaaagatggtttcattaaagagagactttttgaactttatcatgttcaagatacgtcatctatgacacttaaaaatgctattagtgaaatactctcacatcattgccttaatatccagaacatccgtggccaacgatatgatggtgctagtaacatgcgtggtgaattgaatggattgcaggcattatttcttaatgaatgtccttgtgcttattatgtgcattgttttgctcaacgattacaattagccttgatttctgcctccaaggaagttgcttctatttatgaattctttcagcatttgaatttcatcattaatattatcattgcttcttttaagtgtcatgatcaattccatgctgcccaaatttctgaatttgaacatttgcaggctattggtgagcttgaaattgtccaggttctaatcaaataggtacactaaagagggctagtgatactagatggagttctcattattattccatgtgcaatcttcaacgagggtataatgaatcgtgttcagtacttgaaaaaatttgtagtgaaggctcaaattacacccaaagaggagaagctactgctacttataagatgatcacttcttttgagtttatctttaatttaatttgatgaaagaactcataggcatcaatgaaattctttgtcaagcattacagcgaaaatctcaagacattttgaatgttgtaccactagtttcaagtacaaaggaacttattcaagaattacgagaagatggttggaaaataatacttgaacatgttgttaatttctctaagcttcataaaataaatgttccagatcttgatgctcaatatattaaaggttgtgatcatcgacaacatgatcaaataactattgagcatcactatcattttgatatctttaattcaaccattgactttcaattacaagagttggatagaaggtttaatgagcaaacaatggaacttttatcactcagctcttcattagatccgaagaatggttacaaagcatttaatgttgatgatatttgtagccttgcagagaaatattatcctcttgatttttctaagcaagagagaattaatttgaattgtcaattgaaacatttccacaaggatatcccaaaacatccaaaacttcaaaatttatcttcaatttctaatttgtgtgggaggaaagtaaaactcatatgtttgaaatgcttaccggaaaggttagtgtccttttatatgtttgctttgatatataatcattgacaattgttcatttaaatttttaatgttatgtaaacttgtgtaattataataaatatttcgataatttgatatgtcaaattttttggcatgggctaaaattatttcctggcttcgccactgattatactagttaaaacaaataacaacattagaaggaaatttagtagactaggcactagcaaagcctgaattgatctaagtaccatcacgctgaccctgacccttgataaagtagctacgagagttaacattcacccactgttttttggtgagtagtttttcttcgcccattttgaaaatgcacatatggcctctactacgactaatatggcaaagaataacaacacagaagcactcacaagtccaaatgtgctttgcactcttcttttgcttttccaggtctatcaccttctgaatctcatccaggacggcacagtccaaagctctttcggttatgataaaagcgtatcccaaaaattgtcaaaccctaagttggaaaccacatgaatgaatttccacaatggtcgtggtcttccatttggactactgggagttgttgtgtgtcatttaattgcctttgcctgccaattcaaaaataatttgttagtaacaaaacaaacttttaaaagaagaaaaggagatgataggtagtaagagcaatcattgcaataacaaaacaaatcctaaaactagaaatgaaaagaaaatgagagagtaggttagaggaacgattgtctaaccatagaaatcttggatatacattattgtgacattaagaataaaatgtgtgtacgtatagagagaggaaaaggtgatactcgtcaccccctcactcaaagaaaatggtaaaatatgttaaaatttgtgtatttcttattcttattttaattattttcctaattgtatacatgaacatggtacatgtgtgattaatatttcctttactttatatctctatgaatttaaatgtagtatttcttacaagaactaactaacactaggttatggtgattagtatatcctttactttatatttctgaatttttcaaaatacatttactatttttttaatatcacaataagatttataatcttttattatttctataataattgaaattgatttactatacatttatcattaagtttaaatataaataatatttcaaaataatagaaaatacctctcctattaaaaaattagaggtgcatcacattagataaattttaacacaaataaatgtaataattagtataaattaatgctaccgaggataaaaactagaatgaaaaaatttatccaattatatttttttggacaaattttagcatgctagattttatcaataaatgattcttaattacttctgccataaaaatggaaaaaaaaaatgagaggtcaaaatatttactagtccaattaaggttatatacaacaataggagttaaaaagttagtgagtaacgaaaagttattaaattaacttattaaattataaatgtttggtaaaattagactaaaatatatttttcattctcataaatttgaaaatatttggatttcgtccttgcaaaagttttaatacttttttgtcctcaaaaaattaaaatacacaacttttgtgcctcgagctaggcttggctgattctcatacctatatatcactccttcgttggcccatcgtcggttgctctcttcttatgatttcaggagtttaatacccccaacaaattccaaaagaaaaaatgccacaaaaccgaaacatacaaaaagagaaccgaacaaaacaacaaaaaggaaaaagaagaatacaaagaaagaaacaaagagaaatagtgctcatttacatggaccgatcaaagggatacaatgacgcaccatttcctcacaagaaaatattgtagacattggcaccccttgaaaatttccaagatgtttcaaattgtatagatgaaaaagccttcgctaacaaactcatatatggattgcatcataggagtgtgcgtttgtgaacgacgatcgtcgtcacattaatagtataaggaatatttgtcgtcattttttgcacttcattgcttgtcaacgacaaactccatttgtgattctaatgaagataaagatattcaagattcaagaacgaagatcttaatgctcaaatacagatgcggatacacatacaagagtttggggacaatttcccccacaagatatatttatttatttgtatgtgtaataaataaataaataaaattgcccccataagatagttttctttatatgaaggtaaaaaaaatataagaaacaaaagatgatataatttcactactttatttttttaacttttgataataaggatgatgaaaaaatcatagaatatttttaaagtatgaaaatgcatagatgacttgtagaaacttcaatttagattttttttgttatgacattatgcattttataaaagtttgtgatatttattttttgctaaaacattataaactattgagttaattatgttgtcgatccatgtactttttataaaattcacttatagtcattaaacaattttttaacattttttgtccctataattttcttctattaatagttttagttcatgctggtgagtgacaacgttaattgattacacagacaaccatgctaattgtcaagtaaccaatcatattcggggtccaataacttgtcacgtcaacaagcagtatgatgttggcaaccatgtgtaatttttagcaaattgtatttttaatatttcatctatttagattaaaaatataatttaccaaaaaaagttacacgtgattgtcccaccaaactccgtgatgatgtgacaagtcattgagatactaatgtgaacttgatagtaaggactaaaataattaacaaaaagaaaaaaaaatatatggaccaaaaatactaaaattttgtgtttaggagctaacagtgaaatttgcaaaaattttaagggccaaaaacataattaagtccattttttcttgtcctcactaagaaaaatttatggatccgccactactcaagtaccctcgctttaagatcccttatctacatctcaaacaatctccattcactatgttgtaggttgttcgttacaaagccgccatccatggcacaatacgaggttcaacaacattctccacgaagtcagcaatgtagttgttcttgttggccatggtgaaaccatgacaacgacggtgctactatgctcaagtaattgtagtcattaatttggatttaataatttgagatctagctgccagcaagattccaattttagattaagattccaattttagattaaaaagtttggggtttatcgttgacaagcaatgagtgggctaaaatgattgtggtttaatggttgtggttttgatttgtagttttaggattgtggcttgaagaaggtaaaagaagagggttcaaaaatttgtagtggattcttaatattttgtgatagtttttaatccccaaaaattatatttaaaaacttaaatgataaattgtaggtttgaatttacgaacctacattcagatcaaaatatcacaaatttcaatgaaatttgtgtgcctacaaaaaagtactaaaaactttgtaatgacaaaattttaatattttcaattatatgatgacgaaatgtaaacgacattaatgccacattcataaaatatttttatataaatttcaattttattttatggataaaaatatattttgagatgttgtaattttagatttttaattaattttaaacctcttgtaatttcatttatagatactttatttttattatatttttagtttcaattattttagtttttttcatattatgtattctattatttatatatactatatctttaaatatttttaattaagtttaaaataaagtaataaacttacatttaggtagacattataattttattatgttaattagcataatagttaaaataaatagtctaacataaaataaagatatggactcaaagttaggcttgtggctcttggattcactcaaaccttaggtatcgactacttagacactttttctccaattgctaaggtcaacacgattcgactacttttcaccattactgcagcaaatcaatggtccttgcaacaacttgacatttataatgcattccttcatggaaatgtaaaggaagatgtgtatatggaacttccctcgggcatcacttttattcaaccaaactaagtttgcaagcttaagaaaacaccatatgccgtatggtttgaaacaatcaagcaggtaattgtttcctcaacttttttcttcttcaataaacaaatgattcactcaatcttcctttgatcactcattattttttaaaattcataaccactctcttagtgcattacttgtttacgtggatgatttgatccttgtaggaaacaaccaacaggaaattaatgacactgagcaatttcttaacaaacaattcagaaatttgtgacctcgacaatcttaaatactttcttggatttgagattactcgatttcatcaaggaatccacatttatcaaatcaaatatgcattggaaatactttctaacataggtcttcagactcccaaatctaccaacactcttatgaagaaaaacaccaagcttcacaaagataatgacaagctcctggatgagcctacaaatgtcttataggtagactcttatatcttaccaacactagacctgatctttgttattaaatataacagttgggccaattcaaaagtttttcaagcatctctcatcatcaagttgtaatcaaggtactattagagattttttgtgtggtcaagtgaaaccaagttatgaggtagtgtttagaacttgcgtccaagtcgtctcccaaaggattagtggtaatttaaaaaattccaatcaaaagattaaagttttgaaaagtattttctcaatgatttgtgtttgaataataaaagaacaacgtgagaataaaaacaagtaataaaaaatagaataaaggaagaaacaattgcaatgttgttgtgagaaggatggtttgaacacccaagattgaacttggtttccccctttttcaatgtaacatcatcaattaatctagttattcatctaatttatctccaattcacagatgtattctaaacttaatgtcttatgcggaaaattctaagtcctttagattaatttcgaatatgttggaaaattaatctaaatgaccaacattaatgtttaaaaattttaaagagccaaattcttattgacttatgtctagaatcaatccccattatgtactcttcttatttcaagaatcaaacaagtgtttgtcgactaaactattgattcctatgctcaagcaataggtgattagtctaaaacaaacgttaagggaaaaagaagaagaagaagaatgcaactatataattgtattaacagaggagtataacatgaaattatgttcagtcattttcaacccgacagatgaggagattagctggtcatagcttgattacaaatcccataatcaaacatacaaaagagtaatgaaatcaagataaaatccctaggaatggtgctttctttcacacaaaattgatgtctcaaacgtgagaggatgtcatcttccttcacacaccaagtttttataatttgatataggcttggatctgacgtgttttcctcgcttaagcatgagtaatgcctcgcttaagtgaggcctgctgatcttaaaaggtttgactactgactctcctagctaaagtgcatagaatattgtgcttaagtgatggattcaagtttctcctttggcttgactgcctcgactaagcgccttgaggcttatgcttaggtaaggccctccaatggccctagagtttcttactgacttagctcacttaagcgcatagcatgccattcttaagtgagcttgacttcatcatcttcttctaagttcttcttgctcatgcgtcgtccaagaaggttcgcttgaatcagtcatattagtagcttctccgattacttttgtcttggctcagttaagaacaacaacaagccacacttaagtgagaataacttcatttgtaattttgacccaatttcctccaaaaactcacaaaaacataaagaaaattctaacaaattataactctagatatcctaagtgtgaattcctaatttatcctaatttgagtaaatacaagttcaatgtataaaaaatgctagataattgtgtcgattcatgtgtgaaattaagataaaattgacaattatcaggtacctcgctacatcaaaaccacccatgtccctggtctcttctaatttgttgattcttaacttcaacttaaagccttctcggattcaaacttgcaagtagacactagaaaatccataatcggatattgtatttttttggtgaatctttctcttatcgttccaaaaagcaatctaccgtctcacggtcctccactaaagttgaatactgcacaccagcttccaccacttgtgaaattcaatggctcacttacattctcagagaactacaacttcctttcatttcactagctctcctttattatgacaacaagtcacctacctacactgtaaccaacctaaccttccatgagcgcactaaacacattgacattgattgtcacattgtttgcgagaagctttaaacgaaactcttccaccttatccacaatatctaccatagatcgtcttgcaaatatctccaccaagccccttgatttcaaacctttttcacaatctgttgtctaagctaaaagtgtcaactatccactcttcaacttttgggggtaaaggaataatcacagaaagttagtgtagtgggacaatttgcgagaaaataattatttttatttttctgttttttgttaggataattttgttaggaatcttatcccttagtttcacctttccttttcctttgggctctatacctatatattgagacccttacttgtatcatttcatatttcaatctcaatttaataacaattcaattttatctctctcgagctctgataataacaagctacaaatgttagatccttatatgatatatgtttattcattgttaataacaatgccgagtctattaataatgacaataccactttaaatttgaatacccgattaagtcagagtcaaatccaaacaaatagaagagtggttaatatcacaagtaacatgcgtgttaatctcatgactaaatttgtgaacacaagaatgtggatactggagttgctgacaatattcataatgagcaaagacatccaactgccaatgaaaatatttccaactgtggaatgatacatcatttgaaagaaatcacacatctaattagacaaagtcaacttgtaacaccatgagtgtctacaattcatgataacaattacgaagatgaccttaaaggcaaaatttattatggtgatgcaaatactaatttaatttcttatcaagaaatttaaataatgcaaatcttatagtactaatcattaaaatgttatgtttcacaacaaatgatgattcaaattcttattaagataatttatactcattttggtatcaaatataagaaaaaaaaacatgtcatactaactaagaaagttagttaaccacttttaattgcattaatttcaattaatatcattttttcaacttatccttcattggaacttagtatgaaagataagaaagagtcattgaaactaacacctcaattaaatgaagtgtattatagagatagtaacattaaataaggttaagttagttgagttttttttatatatatttgagaccagtgaaactaaccattctaatcatataaaaaatgatgatacatgtgctttatttaaacttatcaatgatataacccccaattaatcatgtatgcttatagaatgcttcaaatttcataggatacattgatattgaagatcttacctatctttgtcaatattgtggagcttatatgtgatatgaagaaagaatgagaaaaaatacaaacacttcaaatttaaaaaaatttctttgttgtggtgttgaaaagattcaactacaacttctacaagcaaccaccaaatcctcttcaacatcttctaattgataaagattcaagtgataacaagaatttccaaaagcatatcagttcttataatatgatgtttgtgttaaatcatcgagagaaaaatcgaacaaatcattcaataatggcagatgaccaccttctcttagaatctaaggccaatcatatcacctgattggtaatttgttgcctatgctagggcaaactccaaagtttgatcaactttatctttatgatacaaaaaatgaaatccaaaacagaatggggggagggggcaaacctaattgatttttatgcctatttgtttacttatattttattacaattctttacttacattcaattcatgttcttaatactccaaatattatcttctaggttttaacttctctaattttatctacagttctaaaagttatattgatccagaaattttcaccaaattgaagatgatgcttgatgaacacaatgtatttgctcaatcttatagagtggctaatgagagatttgaaacactacaacacaaaatatgaaattaaaacttatttataatagaatcattgatgataggatttataatttgcccactgtttttggagttgttgctcttataattggtgatacaagcattggttagcccaaatctgatttactcaaattacacaaagatccctccattaaaacctattttttggcaaccctccaataaagatgttaagtcacatttagttataaaagttaaaactcaaaattacccctcatctccacaatcacatacacattccctgtgttttatacatattacacatgcaccccttgtgttttttaaacattaagcacaatacccctgtgtcgtttcagatttggattatcaatttagagatccacaagtccacgatctaagttttatactggtttgcaccgattggagtttggtcgcgcctcaaatatctttaatgatgttttcatgtttggggtttaagagcctagacgattaggatcatcttgcgtcagaggtccctaatttgagttgtaggggatcgacacacatcgatttgagtttatgctttggtctttaaacacattttataaacctcaattggttggagctttggcttttaggaacttcaattggatagatagtgaggaaatgaagaaaatagagatggaaggggagtgttggcgattggcggcgtggttggggaaggttacagaaaggaagaaaaattagaagaagagaatgattagggaagaagatgggtctctttgactcgaaataaaagtttgaaaaagtttcaaggtttgagcttatatctgttggtgatatatgaaaactcatggtgccaagtctgtattgttagaaacaatggcagtgtaaattgacaagttatatcttaaatgaccatggagtatcatgcataatgtttgaaaaatatgagagggaatgcatatgtaattgtggagatgatgatgatgatttgaggaaaaaattacttacaaatcatgtgctaatcacgtgatcaaacgaacttaatattgtttaaagcataaaaagtgacaatgtggaaatgcaaaagttatatgatttttgtgttgaaaaaaagagaattcttgtgaaatccataccttataaattggagaacctttggaaggacatatgtcacattttgagcaaagagaagttacttttctctttcttcctatgtaattctctcttatattttctcctcctttttgttctcttgtgtttctgtttacattctttctttcttctttctttttatgtttttacttctttgtatttatccttaaatttatccgtgattgttttttattatatattattttgaatatattatgtatatacatgacaaaaagcattacacaaagcttcatttcttaataaataagataaaaaactcctctcattttattggttaaaaaacattacaaattctattctaattcattaattttgcagtaaattttcatatttattattttttattatatttttagtaatatgagatatatagtgataattatgaaagaaataaatattaaattcaaaaaatttagtcatttaagaacaaaaatatttttatcttcattaaatgagaagtaaaatttgttaaaattaataatttttaacaaatttcaaccaatcatagtattagaaaaaagtgtcatagaactatttttttatatttgtaaaattatggtttagtattggatattatttatatattatattataataacgatatattaaaaatgccattttaaactaattaatactatttagcttttggattataatacataaactaattatttaatcttaaaaaatatgtcttttccaaatatggataatagtgtaataatagattattttaattacatagatactctctcacctacaagcatatgatttaagtagtattagatttgattcttttaagcaaaatcatcaaatcgaaaatcatcaaatctttcgagaaagattcatcactaataaaattgttgaataatctatatcaatatcacagtaattcaaaaataatatatgcattctctattataagtaaaattatttacattgaaatccaattgtatttttttttgtaacatgtattttatcttaaaatttacttatcttttgttttttttaatcctaacactatctatttttttatattaacattattcaattttttttatatataggataattatattaagctaaagcaatatatcaaaacatttataataataccccttttaaattatatacacagataatttcaaaatatgtataaattttaaagtgatcccatgcaatataacacgggtatcacagtagttctagtaaaatactaaaagtactggtgtaatttattactcttaaaataaaaaagtgtcagacttctgatatgagtataacggtgaaatcccttgtgttgtgaattctttttgtgttgtgggcttatcccagtatcgtagcccttaccataccctaatttttctttcttcaaatcgcgcgcgctcctcacttcgagtcttcgactttcctcctccgaccatctcgccggaatttcccgcggcggcgctccttgtcgccgcagcttctctctctactgaaaccctagagagagaaaattcaaaaaccatttctctactctgaaatttataatccctgaaattcaaaaaccctaattcccctgtcaagctcgtagcacagtcacagccatgtatggcggtggtgagtaccaaaaccatttccccttctcattctctttcttttgcttctgaaatgtgaactcaattttctccctttggttgaatccacagatgaagtatcagctatagtaattgacttgggttcacacacttgtaaagctggttatgctggtgaagatgctcccaaggctgtgtttccctctgtaagagtttcctctactctttttacttttctaaagttttggatttgttgttgtgtttactgttttgctgatatcattttttggcctatagagtaagaaatgttgttatgctctcagttaatagtgaagaggacactgacatttttctgtggtgataggctagttagtactgcttgatagtgaacttatgtatttttataatttatagttgactagaataatttctggaaattgtatgggtagtttgattgttgattgtcttggcttgtgcaaacctaggttgtgggagccattgatcaaatggatgttgatgaagcagataatggcgaaaacaactctgcctctgctccggaatcaaataataataatgttagacatgctgattctgacaagaccaagggaaagaggaaattgtatgtaggatcccagtccttggggtaccgtagagaccatatggaggtaacccttatgtaatggtttttgtgattggacttggattagtaatttacagatttttttgttccttaaaataatgagtagtgtagttattttcttcttctgtactgttaggtgctgtctccttttaaagacggaattgttgctgactgggatattgttgacagcatatgggatcacgccttcaggtcaatactgactttccaatctgtctatgatatgtattgtaggattattgttttcctttttgcacttgtttattgttagactattgatatgatagagcaattagttgcaagttgttacaatttaaattcaagttatagataatttagtagataattttgagattgttattcctctatactctatatatatttcttgtacactcacaattagatatggataagatcctaattattccattctttcaatatggtatcatagagccaggagcttaacagccaaattgatcctttttcttttctcttctttatttttttgtttcttcttggtcatctatcattgcttccaatctatccattaaatgtagcctctgccaattacctaatggctcatctccttgaagccaaaacttcttggtggctatatgacaaggatcacatcatgtccttcatccgaaatcattcatgatggttaagccgtcttgcttcttcctttttaggtgattaaaccatttttcttctgcctttcaggtggttaagatttttttttgtttctgccttataggtgattaagcagttttttgcttctacctttttaggtggttaaaccattttgcttctgcctttcaggtggttaagttatttttttgcttctatcttataggtgattaagcagttttttgctttttcctttttaggtggttaagcctttttcttgtttctgtatttttaggtagttaagcctttttcttgtttctgtctttttaggtggttaagcctttttgcttctgtcttatggtggtttagcgtgtttgcttctttaataggttaagccttgtgttatgacttctgcttaatggttaagtttgcatttattggctttgatcaacgtgtggactttctccccaaatatcttacatttttgcgtcacaaatttatgatgaacaagattggcgttgtctttgccaccaccatcttgcaggagcatgtcagactattaatatgatagagcaattagttgcaagttattacaatttaaattcaagttatagataatttagtagataattttgagtttgttattcctctgtactctctatatatctcttctatactcacaattagatatgaataaaatcctaattattccattctttcaatatttattttatggcatatatggctagcatttgataaagctcacgcgattccttttttttttttaattaaaatcccttgatgactgatgattcttcttaaaagcaatggtccaaagaatagttgacctgttacctgtatctaaagcacagaaatacatgagaaattctggtagtaatggtgtctaattaatgatttatagtaatcagtaatgaagatttttttccaaacatcaatgcctcaatggtccataccataaatatttatcaatttttttatagtaatgaactttcttttcttttacattggctgttcagggccttgctcaaccctttacaagtttcaagtaagaattaggaacattgcacgaacacagggatagttagcaagtgttgagtagcaatattttggaggtgaaaattggggatcaaatcatagttgctccaaccacaattgcacattttagggttttttttttttctttttatcttacaaaataatgggggagattgagggggatgaaagcatatgaatcaaactaagtgaactaacatatagataattaaggtcacaatcgagcctaaaagaaaattctaccagatagctataagatcagtgatgctttgtatggtagtgattgctggacatcaaagtgcagaagagatttgataagtacagcagagatgataagttgaggtggatgagtggatatgcaaagaaaggaaagataagatcaagaacaaagatatacaggaaagagttggagtagcaccactgaggagaagataacagaaactcacttagaaatgtttggtcatgtgagaagatcaacaaaggctccagcaagaaaattataatgcaacgaaaagggtagaggaaccattaaaaagacctcacacaaaatggatttgcagaaaactgttattgataatttgatatagctctctatattttttgatccatgttactaaccctacctagtggaataagtgcatttttggaaggaattaattttgaagatcataatctgattgatagaacaaaagctgtttgtgttgctaaggctttatgttgttgttggtcgttcttttcctattctggttttaaccatttttccattgtatttttttatgttttttgtttcatataccttaggaattgttttatttgtcacggggctcacattctttttttggtagggaatggctattgattgggtgtgctttctttttttttttttggtagggaatgcctattgattgatcctaaagagcatcctatgcttcttgcagagccttcttctaactctcaacaacagagagaaaggtattttggttatgatttattgtctagaattaatagagctcagtttaaagcatcatatgtatgattcggttttttaaattttgcaggacagcggagcttatgtttgagaagtacaaagcacctgcgttgtttttggcaaagaatgctgttagtccttcactgacctacacctttaaaaataatatgtcatggagtgaggatgaaaaactactgatgggttctgacttgtcttgacatacaggttctgacttcttttgcatcagggcgtgctacgtcattagttgttgatgggtaagagatcatgatgttactgagtggtagttttgttcttattctgcggtagtatcaatatgaacaaataacactgatctttctcttcatttctgtataggtgtatatcaattgcttaccttttaagatattatatatggaagacctatgtcgtagttgtcttgtttaattataccttacatgtcttactttttccaattatagtaggagaatgataggaatttggaattagagaacaaataatggaaatcaagctcctaacaagcagaggtagctctctgttgagacttgagactaaaatcaaagaaagaaaatactggggaattatgcagactcagagaatatccactcctcctaaaacctctcgacctttaaattcttgcctatttctttaaaattcttccctctcactttatccttacatccaaccctctttttacacactcaatgccatgcaatgcaatcagtctcagtcagggttgttacattccaaatttctctttagcccctgctcccttatactgtcctcaatgtagtagtcatatactcgtataaagcctcatagagggcattagactttgctttagtagcaggataagggaagttttatttatttaactgcaaccaatggatcaaaagagttgcaaatggcacataataaaattatacttttttatttcagttctggaatagaaagtcttaccattatatcagttaacacttaacagcgagaaataaaatatcaggaggctttttacttattatgaaacattgttaaataaatgagtaaactgtgtaccttaagttgggggataacaatatgaaagtttctttattatatatatgttaacatgtctaaagattgttgttttcctgcttgaccattttaaactgggtttggtaatacacaattagacattggcaatgttccattccaaaaagtggaatgggtaaagcagcattttgaatacatcggaggaggctgatatggatgaaatttgaattcctactatttgagtcaaacacagtggattgggtatttgggtggacctttaagcatatgagattaagaattcaattgaaaaactgaaaaggggagagagaaatagataacttttaaagttcaatatttgttatttcttctaatatgtcccgataacatgccagaagcattgctgataagatgttttcttcattattccattgttttcagtggtgggggatcaattacagttgcaccagtacatgatggctatgttcttcaaaaggtacatgatccatattttgattgattgtttgccaatttattatatttgactttaatgctgttttaggaacctgcattgatccaatttcttgtatgcaccactctgattatggataaatttgaaacgatgagattgtttgattaacaatgggaaatatatacattagatgtatgaacgaaaatcttgacaaataacctggtagtagagttgtcttctgattatgtaattgctattttgtctattagtaatttttggttgtgtagccaactgcaaaaagcaattatattggccatcatctctctattattactcaattgttagattgtgttttacaaaaatacaactaataattcaaaattgtacgagagtggctatgtgtatgtgaggcactattgcttgccttggtatttactaactaatatttcttcatctatgctctgcatattcgtaatatcttccattctgttttctatgtagtatgtatgtgcatgccgcatacacacatacacatatcattaatttaagacctcattgtactcagcatttatatttgagttttggctgatactatgggtctttctgtctgctcatattttcttctatgtttacaacataaggctgtggctacctctccaattggaggagaatttcttacagactgcttgatgaaaagcttagaaagcaagggtattacggtgggtgacaaacattagtcattatttttatcagtgatcttctaaaataaaggtactgtgattttatctgcctgagatttccccccttttaattgccacagataaaaccacggtattcctttaggagaaaggaaatacgtcctggagagtttcaggtataatttgttttcattttaatgacctgtgagtagcattttttaattccattatcttgcaatcattgaagtgtgaggcaccagacttgttttttttactgttgttttcattaaactttgaacatgggcaggacgaggttccatcccatgtgtattatatgtactgtatgtgcctccaggatttctggatggtttcagtacttcatttttctcatctcttttaattgagtgttcttcttgaatcgttttcagtcatggataaaattcgataaaaattgcatgtgacagtatactgttgctagtgacatgaactgaataatttacctcttgtttgatctactagaataggaatggcagcgggacccaaacccgtgggtacccgcccgaatccattctgattttaacgaggaaaaatcgagtttattgggttcgggttttccccgatagcaaaaagtgggggcggtggcgggtatggaattactgatacccgtcccgcccccgcccgtaataaataatattaaaaaaattaaaaaaatatattattttctaatttttttaattgaattgattgattttgttttgtaatttttaaattatgatcccatattttaaatgtgggtttgttattattttttttgttatgtaattagtttttttgtctcatttttcaataaaaaaactatattatttttttttattttaatcaaatagcaggggcggggcgggaaaaacccaactcccagcgggggcggggatggggatgggttttaaaacccgactgggatcgggggcggggactgggagcggtttttgagtcgggggtggggaatgcgatacccgcccccgccccgccccattgccatgcctatactagaattaggttagctactaaatgtttgtgcaagttagcaaattaattttaaactcaagatatcaaacagagaatggtgttatcctgttaggtatataattaaggatcagaacaaagaagatggagtgaggtgtagttatcttactttgtttatttcaattacatatataaccttgcatctgttgttacttgtagaattttggtgggaaatgatagtgagcaaaattgcccagtgtttctctttattagtagctctaaaatttagtttcgtgcatgtatcattttatataattttggttgtaagttgttactgcaattctatgcttaaataattattatttctcattatcattttttttctgaatcttacagacagtagatcttgagtttccaaatacaactgaaagctacaaactctattcccaggtttgtgaatgaccatgtaatatctcattacttgttgcttttcatttatctgatgaccgttcttcatgacagagggtgattgctagtgatatcaaggaatgtgtgtgtcgtgctccagatactccatatgatggtttgtttacctcctattgtcatctcgcgtaatgttttgaatcttactggtcctgtacttttgttcaaatcttattggtcctgtgtttcattttgttctttcgaaggcatgtgaaaaatctcctagtttttatggtgacaacttttatttcttttgagctcctttctctctgtatacatcttagataactatatatttgatgcctcttgtgatgttattttctaaaccaatctctgctttcactcaggtcatatatgatttttttttcaatcatctggtttagtgataaacttgtacaagtcttcagttagctctttatagctctatagaagatggctttacctttttggttcctatagcattgcagtttctgtacattaaatctatttttttcccctttttctgacagagagtgcatattctaacatcccaatgacctcatatgagcttcctgatggccagtaagttgatgttattcttgttctttgaaattgggtggaggatggaatgaataatgtttcatcttcaaaatatattttttcatttcatatgctactatatgtacctcatagactaattgttgcttctggtttttctgtaatttattgtctgttgttgtcttgttatgtgtttgtttttattatgcaggacaattgaaattggagctgacagatttaagattccagatgttcttttcaatccgtccctggttcaggtgtgcagcttgcattcaaagatgtgattagtttttcttgttccttcaatgtaaaagattataatttataatattgcatgatattaaaaatatgcgaaagcttcttgcaaggtattaaaagtaaaaatgtacccttaatgcactaaggactcctagtgccttgaggtgaggtgccaaaagacatgcctcactgaagattggttttaataattggaagacagtaaaacaaaattcttgctataccacaatgacatccgtgttccacccgtttatactataaacgaagaaaaaacaatacaaattttatcacgggaagatattttttgttaaaaaatgataaattttagttatgttaattgttaattataaaactgttaaaaagcacagcttgtgacatgaacaaaaacgaatataggctataaatatatagaataaaaactaaattattgaagtgtttccagttaaattttctgggtggtggttgtttttgtgtgcaatatgactggtccactttttgttgtgcttctattttgttctgcagttctttaaattacttgagagtcaatattcctgttcttttgttctatgtgctaattttcttatttgtgtcaaatgataattacagtcaattcctggcatggagagctttgcagaaattgctccttcagttcgtggcctgcctcaaatggtaatttaacttgatgtgaatctgttttaagtatctaacttgctattgctgattgttttatcattttgcaggtgattgaaagcataaataagtgtgatgtagacattcgaagagagttgtttagtagtatactggtaaagttgatttatctttcccttctttctacacaatcattcaagtagttcttatgtagagcttaatttagtttaccgcagacatttttggtgtaaaaagggaaaagattcaggggcatcctttatatggagaatttttacagttatttttgagattgggttgcatgcgtgggggcgttagtgttgctgaagttgtaatttcatgatgttaacttaatattttcatcttggttggaattctatttgagttgtatttaaggcaaatgatcttttccctagaactttgaccaacatatatttgctgaaaccatatgctgtacatttattacatatagtttataatcaattgataggttttgaagtatttcatatcaatatatcatttcctggtaaattaaaattgatttcatttatcgcatgcagcttgctggtggcacagcttcaatgcaacagcttaaggaacgccttgagaaagacttgctagaggtacattttaacaaatgagtccttgtctatttcatccactgaatggcaatatggttgttggtgctgagttcaaatacctttgaagcttatgttgttttaacatgtgatttcaaggggtagctttcatttttctttcaagtgaatttagtcgatgtctcatcccaaatatcagtagtttggacaatttttactttgttgactgcgccataatacagccttgtggggaacttgtttcttatctcacgtgcagcagtgctacagagttttcttaaatcctgtgactccgaattttcactatctaattttggagggatgggggtttgggagattgagtgtaagaatttacagcaaggacttgtgcatataacaacagcaagaatttttgaaattgtgcatgtgcatataaattttttaatttgtagccaaaggttttagtcttgtcatttttgtagattagaattaaatatatttggcttctctagaaggcttgtgtagtatttgttgttttttttcttccagcttcttacttccaaatacaattttgaagaaaaatctcttatcgtttcctttgggtgtttcttcggtggaacttgcaatatgcattgaagaaatcttttgtgctaaaatattatatatatatatatatatattattattttttctttagttgcctttgggaagaaattgtgtgtgatattgtaagttattttttttactgaattacattaacaattaaaaaagttatatagttgtaaagtacaatggtccgtctgtaagattgtgctcaaactggactataagcatttagccaatgcttctgcaggctggcacctctgattagagaagataattaattaagttgaaaacatttatcaaaatttctcttaggaatcagatttgagtttataatattataaagacaacacattggttctttttgaattaaatcatcaggtggcatgtgattgcccttgttcttcaagaagctggaagggttaattgtagctgtaaatattgactacaatttcatttccgttgcaggagtcccctcaagctgccagagtaaaagtattagccagcggaaatgctactgaaagaaggtttaggtgtgttatctatcttatgccaatgcatctaatcagaggtttagacgtgtttccttttactgctagatttggaaaacctttctaaagcttccccctcttttgcaaacctctgattatgattccatttctctccaaaacaagagagaccgagattaacattttatgtggtagtaattgttgatgcattgtacatattgtgtcttatagttctaactcaatgaatgactttatatgcagtgtttggattgggggtagtatattggcatcacttggctccttccagcaaatgtggttctccaaatccgagtaattataaactgttcaccaaacttgcgattatactagttcattaatgttgatatatatttcactttgcctatcttgtttctcccttttctcataaaagctacgctgccaaatccctttcattaaggataattttacactgaatcattttaatgcatttctgataggtatgaagagcatggagcttcatatatccaaaggaagtgtccatgagctgctgttggtacttgtacaagtttattttactgccatttatctggaagtactatgaacgctgatgtagtgattgtctactaatggatttttatttcctatttaatggccattcccattagatcccaattctaactaaattattggcctcgaggtgaatcacagccaacctttaactaatcttgtgatgatgtaaaacttgtaaagtgtgcctagagtctgtaacaattgtcccatttatcaaattagatctctcctgtgtacgtctttttcttttcttgggtaaatgtgcatactttgtcatgactttaacttacaaaataagcctctaaacctatctttaaaatttgtagaaatattggaagtgttcctccccaatttgattcattctaaattaataaaggtgttcaaaattgaatcaaatgatttgtagctagataatttcataatttgtgcaagactcgagcaacaaaagaccctctacactacggagatggtattttttagctggaatttgtaatcatttctggcgcatatggccaaagtctgcaggcttgagttgcaatgggcatgtagaccacttttttgggggaaaaattttatacaccagtcaaacaactaatacgtccaaaattttatttaaatgtcaataataccctccgttgtttataacagaagctgaacatctttttttggtttccatgaatgacttgaagctttggttgagtgtattgtgagtggaaggtgttggttttggtcgttttggctggtgctgtttgcctttgtcgctgttgggttggttggagtcgtagacggtggtggtgcagctgttagtgaaggtaagcagattttttagcatatacggattcgataatccatatacaatttacggattaggtaattcgtacgttaatgtagaatgggttgatccgtatgagccatacggattagtcaattcgtacgatataaataaatgaatttaattattaaaaattgatttttattattaataaaataagtaggtaacaatatattgtattttgtaattttgcatgttgaaaataaatgtataacatgtggttgataatgtggttataatgttgttaattattattatgtgtttgtgttgtgacttatgtaagtgtgttgtcatttgtgaagatgaacaatgatgagtggatgtatgatagtataatgtctcaagaaattgatatgaatgaagatatcggagatgaacctagtgcatttgaaaatactgattgtttagtcgattgttctgcaccgttcaatacttgtgaggtatgtatattatttttaaattggttaatgtttataaataagtgatttatggaacttaaacttgattatcgatttgtgtaggtgttcccttctcgtgaggatgtattaaaatgagttagaactgttgcatatgacaatggttttgtagccataataatgaggtcagacatgcatacaggaaagaagggaagaacatcatttgttttaattggttgtgagagaagtgtaaagtatagagcattcaacaaaagcatggtacctacagtgactagcactagaaaatgcaattgtccgtttaaattgcgaaccaaaccagtaccaggaggtgaagggtggatggtgaaattattatgtggcactcataatcatgctttgggaaagtcattatgtgaacacctgtatgctggtcaactaatagaggaagagaaggttgtagtgcatgatatgacacggtcgatggtcaagcctaagaatattctcctaactttgaaagagcataatctcaataattgtacatctttaaagcaactaatgaatgcaagatatacatatcgtacgcgtatcaaagaaggtaatactgaattgcaacacttgatgaagcttcttgaacgtgacatgtatatttattggtatagagtaaaggatgacaatgtcatacgtgacctattttggacacatccagatgcagtgaagttgagcaatgcatataatgttgttttcctgatagacaacacatacaaaacaaacaggtacagacttccgttagtggacatcgttggtgtcactcctactgggaagacgttctcagctgcatttgctttattagaagctgaacgtgtagacaatgttgtttggacactagaacgttttagaggcatatatttattaaaagtgaatttttctcaaaggtcattgtcactgatagagatttagcattgatgagtgcagttacaactgtgttccctatgtgtactaatttactttgtcggttccacattgaaaagaatgtgaaggcaaaatgtacttttatccgacagagtaacgcatgggactatgtgatggaagcttagggaagtcttgtagattgtgctaatgagaatgaatttggtgattgtattgcaaagtttgacattgcgtgttctccattgccaacttttgttgattaggtcaaaaacacatggctcaatccacacaaagaaaaatttgttacagcgtggaccaaacaagtgatgcatttgggtaacacaacaactaacaggttagcaaatctttaagttttgttaagttattgcttttatattctcaatgtaggggatagtttttgactgtttccattggattgcagggtcgagtttgcacattggacattgaagagactattgcagaatagccttgacgacctctgtagtgtatgggatgcaatgcacaacatgctgaccttgcaacatactgacattagggcatcattggagagaagcacatatgtggtgggtcatgtgtttaaagtaacattgtataaaagactgattggaatggtgtccaggtatgcattaaaccaaatagctgctaagtatgagcgagtccattatgcaggcaagaacaaaagtcgttgtggatgtgttatgagaactacgcatggactgccttgtgcatgtgagctagctaaatatgttgttggatccatacctattgatactgttgatttttttttgcggaggttaagttttgaagatcaaggtatagatgagggtcaggtccacataactgaagagatggaagccatatctaggcgttttaataaccttgatttttgtgggaaggtcactctaaagacaaaacttagagaaattgcatatcctgacaaaaactcaatgtgtcctccgcctaaaaaagtaaaaacaaaaggtgctcaaaagagacaagtttcgcaccacgcgagatcaaccaagcgggatccatcttactgggagtatgtggatgaattacattctgtgcggaatagttgttccacacaaaaacatcctgctacatcttcggatgatgacagacatacaaagaccaagctgccaatgttggatcaatttcatacatccatgcatgatttcattgtagacatcattgatgttaaagctgatggtaattgtggatttcgtgttattgcggccttactaggttatggtgaagaatcttggtctttggtccgcaatcatttgcttaaagaacttgcacaatggtctgatgaatatataacattgtttggtggctttgagagatttgatcaattgaaacggtccctacttgttgatggcttgtcaaaggtaactaaagtgttactatgtttgtacttatacattaacgagctattttttgttaatgtcaggtaacaattgataagtggatggatattaccgatctgggatacgtcactaccaaaggctaccaaagtggtatactagcataagagcaataaggcacaactaataaatccatgcaagcatcttgaccactaccaaaacatattgcctttttatatgatatatatacaataagaatgtggtttttgtgcagtccaggtttttctatttaatataatgtataggacacaaatcaaatttccatcgatcccaaaatcactattaacatcattactacaacatctaattatttaatctaatttaaataagtttcctagcgactcaaaaatgtacaataaccaataaaagacaattcatttaatcataaattttaaaaaaaaaacaattttaacctcctacggattactcaatccgtatgaggcatacggattgaaaaatccataacaccaatccgtatgccttctacgaattacccaatccgtatagggtatacggattacccaatccgtggactacatacagaatgcgaaagcacgtttatacctcagatggcggccataactcactcacacctccagcaatcaaccaacaaccaccaatgtagactcaaacgactgcaaactgacccaaggctatgacgactggcggcacgcgaaagaaaaaggggaaaaacagtgtatgtggcgacaagcgtaaccaaggcaaatgaatagtgattcacttaattatatgagcaggggcatttacggaaatctactatgcgtttctgggtgtataagccttttgttggtgtataaaatttttcccctttttttgtttttttgtttttgcaaattcttcattttgcatttcaccagcccaacatcatcaagcttttgactcagatgaagttgagacccattttatataagtgtatgctttgactattttgcttgtgacactgtttcccatcttcatcgtaccaaagtcactattttggttggcagtgaaaaatccccacgtggccgaacacctaaagcaacgaacaatccatgaacaatgatctcaaccaaagttgtattctccatgaaaaatacatcatcatcttgattttctactatgaccataatgttatattttttcattgaacaatttggtatgacttaatagtgttagcattttgaattttgcttgagatactgacattgagacttcttatgacctaccttactatgatagtaacaagtgatcttggagggttgagatttagataatttgatcgctttttgagattcatcactacaatttctacttgcgtttccttcacaagtctcacgtgtcccaaaattgtctacaattttatattggataaccatgcattgttccttcctcctgactttttcattcaacagctaccagtgtggtagggaactatatggttgaaggacttgtgattcatcaagccctttgaaaaattttatgttattgatcatgctttgaccatcattatatatacttcagttttaccttttgtctcaccttaaggtgagcttagttttaaggaaacttttgttgaatcatggttttgatttttgtccacaaattgtatgcactggtgtaggtaaatatgtgcttaaacaagttttgatcaatgtattttcaaatcttagttatcgtcttttgatttagaagttgtagtctttattggtctttccctttatcttgttctcttaggtaattgccttatacaagtcataacagtacaaatgatctttccataatcaactttcaataggagtaatttttgacaatattagtttgagtatgtcttcatcctaagtgataatacttttcacatatggaatcacatggatgataactctatcaataagatgaactctgatactacaattaagaaatatcatcacacatttacccttgtgttaaaaaacagcaattagagaaataagaataaaaatagaagaaacatgacaccaaacatttttaacataaaaactctttataatgaccctcaggcctggcgcggctagcgcgagatgccgcgcggatagcgccgggatttctctgtaaaaaaccaagtttgaggtgcggcgcgatcagcgccagacacactggatgttggcgcgagtagcgccatagtggctcgggtagcgccacaggttctggaggttgacgcctgtagcgccagaacggcgctggtggcgccagaaaactctggagacctgtccttccctggaggttggcacgagtagcgccactggtattggaggttggcgcagttggcgccggagtggcgtggttggcgccatgggttctggagcttggggcgatcagcgccagagtggcgcgatcagcgcggcagctcgggcagacccactataaaaaggtcattttacgaaattttggcccaaatcccttgcttcttcttcctccagcgaccgacctccattgcttaggcttccaagcttcatgcaccttcatcctttgacctaaacacctccctttaaacaccaaacttgttggaaaccacattgtaagcttgaatccttcatccttttcccctaaaacccactcaacggagaaacccctttctctagggaccttcgaaaagctcgagttcggcgaggaacggaggcaattcacggacacccaagctaggggaagtggtccttgggtcttccttgtcgtctttgaggtgagagactcgagtttcatcgtttaattttgtgagttggggtttgggataaatagtgacccactggtgctagagctagaattagccttgggtgctttagaaaagtatgtttagatcgttgttgtgatggaggattagctctcaaatgttagtttcatgaaccttggtttttggctctatgatatgcatgtgtggctagtatattgagtcacttgataatgctatgacatgcaagagtcatgattattgctttgatgtgcttgggaggctttagaaacggtgtcttgtgtgagaggaaccgttcaagccatatgtgaattcttgagtttggccagtatagagctgaagctctttgttttggcttgtactgagtcttgtggagactctagtgccgtggctaggtcgagatggacatctgagggtccaggtattgtctagtgattggattaactttgataaccttaagatagaggacttaaggctatatatggaaaggaatgacacttcctttcattgtaaaggttgagaatcgttgttatgtgccttgtgtggttaaattgatgattgattgagcttatatgccttgtatagggcatgacaccgagggtgtcagtggcgtagaccaccgtttagggattgaaccgcagagcacggctttgccaggcaagttcttggttccttggagatgtttcccaccgctgtgtcccaccatactccgagggagtgatggttgcattcatgatgcatgcattaaatggttgttacttgctcataatgatatgtatgcgtgaatctataccttgtatgtatggatacctgtgattagatcttctggccagttaaatagatatggacctccctaggagaagagcgcacctcctagcttggtttgctcttgggtgatgatgatcccagggtgatgatgatcccttaagaccaagagataggtggtccagtcgcggttgaagcctattcttggaggtgccatatacgtgcgtccatgcgtaaggggtagctcctaatgggatggcacgggtgtgagttccggtctcacactgaggtttgatgctgatgatgatgcatcgtgacagcgtagttccgcagtatacattagagctagatgacttggctatgtattgttatgagggccgggaggctagattatttgtgatgccttgatgacgtgtgtcatggaaagtgagccagggtgaaggagatgcctccaagggccctgagcttactaagatgtgtatctcaccccgtgtggggattatttgtttcaggtgactcttctggcagagatgatcggtctcagggcgggaggccccagtagagacagtatctgcacgactgtgtgtcagcttgaggagagcttggtagctcagttttgctgatgatgctttgtactcctgtagagggaagatgtgtgtgtgtgtgcacatgctatgttttgtgttgtatatatatatatatatatatatatatatatatatcttgtatgccctcgtgtgaggaaggatctttgagatcaaagcactcagatgcttattcttttgtatagacactgtgagtgtcagatgatgcttatgaacataacttgtttaagttatgtaattgtaattcctcatgtttcagttgattgtgatacttgtggttatctacctatgtttatgttattctggatcagcaggggcttgtgttgtgatgtgattttacatactatacataatgtatcaagaaatatggtttcgaaaatgcttccgcggggttttaattaaagttaattactgcgcttatctgattaaataatatgttaatacaccggatgcatacggggtgttacactctttgaatgtgaaaggaaaaaaatgtaacatcttgatcaaatcacactagaatgaaagagagaggctatgcaggtatgatactatatagctaaggatgacttaaaggaattaattgatattatctaaaccaacaagatgcatctactttttggtagtccatcacttaagaactttatagttaagcatgtttgacttggagtagttataggatggatggccttctgggaagtttttcggaaagcgtgtgagtgaggacaaaacatgctgcaaagtcttgtattggtttgtggtgtcattcattgatcctggaagtagacaaagttgattttcaagatctcgaaaagggctatttatagagggttctaatggtggagggttttggtcaacaaggatcttgagtgaaatgccacgtgagaagtgctgtagtgtgagccgtcgagagtcgacaaccaaggatattacaaatggtatcagagccgacctttctccttgtatgatgtggtttgagcatgaaataggtggaaggtagtaggcatgtaacatcccaatcgaatcacaccagaatgagaaggatccagaggttgtacaggtatgagactgcgcagttgaggatgacttaaagaaattaattgatactacctataccaataagatacatctacctttttgtagcgcatcacttaagaatttcatagttaagtgtgtttggcttggaatagttatggaatgagcgatcttctgagaagtttcctggaaagttgtgaatgaggacaaaacatgctgaaaagtctcatgttggtttgtggagttagtcattgatcctgaaagatttttgaggtctaaaaaagggataccaacagagggatctaattgctggagggttttgtcaacaaagatgttgagtgaagtgtcatcaagcaaagtgccatagtgtgagagtcaattgagaagttgaaaatcagggatgttacaaaaaaaacacgagacctagttcaacaaaactaactctttttcaaataaggtaaaaatacaagtctctcttgaagtggataactaaaattcattcattttatcgctctaagagataaacttgtttgtagatattatatatatatatatatatatatatatatatatatatatatatatatatatataaagagagagagagagagagagagaaaagtcaggatcaaattataccggtgtaactttgaccaattattacaacgtccaataactttcaattgaataatattttcttaaaatctaccattggattgaaagttcctttcacgtacatgatatatacaaaatttcatattaatataaaattatttgttatctcattcatacaaattaaaattaacataatattaacttttcaaaatatattaaaatatggattgtttgattatcttcttattattgttcaattttaacaaaattccacacaaacaattttggtaatatgtaggtataattaaatggttggatctataaatcgcattttatatcaagttataaaatggtgtaatagttgtttatgttataaaatgtgtatgaaagagagagtaaggatgataatgagaatgattagggcgagtttcactattctcctaatttctgtcccacccttactaaaggtgaggcaagtttaagaaggtgaatattaaaaattaaaactcaatctcattcatgttaatgagattaagaaatctacttactctttttttaataaaaaaataattattcacttataattttaaataaatcatataccaagttattaattataaagtggattttttttaattcaacctaattaaaatgagttttttctatcaaagttggatgagaatcggatagatacgtgtgctcaaatttatttttcatgtctattgagaggactatgatctctatgacttcttggttgatggatgttaattaatttttgtattcttaaaatttcaaattaatttattttgataagttgtatggaattgtcagagattaaagaatgaattccaggtcttcgaaaagttcttcttccttttttccatggattgaaattattaaatcgtagctctccatcaaaatttggagggattttctataaaaagtccatttaatttcatattaaatttttaaaaagtccatttgtttcgctcaaaattatactcactaaattaaggataaattttatccacacgcaaatttatgaaatagttaaatttaggataagaaagaaattctataataaaataactatggtacatgggttattgacgagggatttaattctaaaaaataaataaataaaaaatagaggatggacttaaccattgaatgaaatcatcctcacgacccaaagccttataattataaaaaaaaagtattggaatttaaaaaggaagaattattacaatatttcaaaattttagtagataattatcctttagggtagttaatattttgattacttctatttatttcaacgtacttgaatagtatgaaataacaaaagatgtatattttaattaaaactaataagatgaaaataaataaaataaataaggtacttattagttaagaaagaaaaaaatatagtagaagaccatacatcgatttaatgaaaacatatattttttaaattcttttgggggtttataatagttgcagaagtctcattgaaagggttttaatatacactaatatgatcgtgttagagattttttttttttttctgaattgcaatggtgttatagtaatcactctcttcggatctattttctgttgagtaaattgtttctttcctatcacgatttttttctgtcaaaatgtttccacgttaaatatcttcttcctttttttttttttttttttttccggagatgagaattctaaaagttatcagtgtttttcgagaggcttataaaaaagtgactttggtgatcatatcgctgtcttggacataaaattatataggttagatatattattttctgtaatttaaatatcaatacatttaataataatttttataaatatggaataacgtaataaagttaagttgtctctctttcttaaactacttttaaatacaacttaagtatataaatatataattaaaaagatgattaatatttaccttagttgttattgatacaagtaataatgacttatgtctcttaaccaaatgatttagagttcgaatcttaattgatcattgattataaaataaattgtgttgaaaaaatatttatcctatatggttcgggtgcattagcagtcaacaccaattttttttaaccaaaaaactcattagttcttttgcttatcgaaatttaattcaaagagagcggtatttattttaagtaaaattggtgcattagcacggtttttttatttttattttttacatttcctctcttatttattttttaagatatatacaaaacgttttaaagagagtagtattttttttaaaaaaactaaaatttaaggtaaatcttctaaataatctagtctagcacattaaaagaaattaatgttttcatataattatcaaccacttaaaattattgtggcatgaatcctgagacctggatgcttgaacatggttttcgataacttctccacaatttctattacttacaaattaaaggactatgaatttatgtttaagagtttatgaatcattttttagtaattaaaccaattttattttcaaaaaagtataattctcacaacacatcaacataaatatttttctattcatttactaatctcttcacagcagtgcacacacacacaaaaaaaaaaagaagctcaaatgttcacttttcaatattaaatcaaatgtccatttagactacgtacataaaatgtgtgccatgttggataatatatcattcaacttgatatgattcttagatgtttgttttgataggtcttcccgaagattgccaacaccaattgtgcttagcccattggggatttattgtggagttggcctccaacctcttgaatttcttccaatcacgtagggccaccttcatatctgccacctttgcagtgatgctcttacaacaattggcatggattgtggcgactgccctaaaatccttactatcttggcaaaatccactaaaataaagggtgtccaaaaacctcaccctaagtcctaggtgttcaactatgccacttctaatgaggtcaagaagcacatcttgttcttttttttcctgtcgcattgtccttttggccataccatgtttcaaataaaaagatggtcttgttgtttgacctaacaaagtaaaatctagtgttgatcagatgcttttctgaccaaggatcaccaagatacgagtctgtgctgatttggaagtcttctatctcattcttactcaatttataaatggatttcttagccacattacatgagtgtcctgtgaaaaaaagatgttgcatatgaattagagaaatgaaaaagttgaaaaagtgaaattgatataatttgatagttttatcataaagtatgtataatgaataaataaatgtttagtgatctttatgatttaattaattaaggtttggccatagcacccttagttagttaaattataaattcagagcctctagatcacataagaaaaataacactaattgtaattagtcgtatgtaatatgataaatatcatctcacaagattttttttatcatgtttttgtatgattaattaggataaaaatattaagttatgttcttgatttgcccacagggattaggaaatataactgatatgttttatcattaagttcatatgaattttattgaattaaaattttggcctacatgcaaattttatgtcactaaattcataattctttgagcatgttttacattggtaaagcatgataatgatttatttttgccacaaattttaataataagattatatttgcagttgtacaacctgttagttctattgaagttccggaattgagaggggacaattacccaatttggaaggagagaactctcttgaatttgggatatatggacattgatgaagctatcaggaaacctgaaccaccagctattactgagaacagtgagccagatgcagtggatcgttttgaaaaatgggaaagatccaaccgtttgtgtgtcatgttcattaagactaagatctcttttggtattaggggttcagtggaaaagcataacaatgccaaagtgctcatgaagtctattgatgagcaatttaagacttcaggaaaagcactggccagtactctaatcatgagattttcatcaatgaagttcactgctttaagggtgtgcgtgagcacattatgcagatgagggacattgcggcccaattgaaaactttggaggtggatatgtctgacacttttcttgttcactttatattgaacactctcccagcaccatatggtcccttcaacatattctataacacgcataaggacaaatgatctattaatgaactcatgaccatgtgtgttcaggaggagggaaggttgcaattagaacaaggagagagttctgtgctgacaattgagaaaaatgacaagaagaaaaaatataagaacaagggaactggtaaaataccaccccagactggaattaagaaggaatcatccacgtgttttttctgtaaaaagaaaggaacatgaagaaggaatattctaagttcaaacaatggtttgaaaagaaaactatgtctacctctttagtctgttatgaatctaatattattaacataaatcataacacatggtggattgactctggttctacaatccatgtttcaaataccttgcagggtatgagacatctttcagtttattttataattctgatctcatagggaatggtattttatgtgatggtcttttctatattaatttgcaaaatgataccacttatgacgctatgcatgttaacattggcattaaacgatgtgttatgaatgaggattcctctatactgtggcaccggagattaggacacatctccattcagagaattaaaagattagtgaatgatggagtacttagtactttagatttcactaattttgagacttgtataaattgcattaagggaaagcacacaaataagtctaaaaaagggtgccaagaggagtactaaattattagagattatacatacaaatatctgttgtcctgatattgacatatatggtcataaatacttcatctcttatatagatgattattcacgatacatgtatctctacatgcttaataataagtacgaaaccttagatgcctttaaggtatttaagtctgaggtagagaatcaattgtagtgagcaaattacgatcctgagattggatagaggtggagaataatatggtagatacactgaagatggacaagcacctggtccatttgccaggtttcttgaagagcatggaattgttgcccaatacactatgcctggttctccgaatcagaatggtgtaacaaaaagaagaaatcgaatattattggatatggtgcgaagtaagctcagtagttccaagcttcctaagttcttgtggaaataggcactagagatggcaatgtacatattaaaccgagttccaactaagactgttccaaaaactccatttgagttatttaaaggttggaaaccaagcttacgacatgtacgcgtttggggatgcccgtctgaagttagaatttataacccacaagaaaagaagcttgacccgaggactattagtgggcatttcattggatatgctgaaaagtctaagtgatatagattttactgtccatctcacaacactaggattgtgaaatcaagaaatgctaaatttctagagaatgacttgattagtaggagcgatcaatacaaagactttgtttctgagaaggatcattcagttgctcaaccatccacttcaaacgtgaaactggttgttgtccaaaatacccctctagttcaatcgggtgttatacaaccaatcatacatgatctacaacctgctgatgatctagtagatcaagttgttcatgaggaacatgaagaaattgttgaccaactagtcgaacaacaagttcctcaagaagctgatgtctcaatattacgaaaatctactagagtaaggaaattagcgatacctagtgactatgttgtgtatttgcaagagtctgattataacataggagatgcaaatgatcctgaaagattttcacaagccatgaattgtaaagaatcaaatttatggtatgatgctatgcatgataagatgaattctatggcatcaaatagagtctgggattttgttcagatgcctgatgatgcaaaagccattagatgtaaatgggtttttaagacaaagaaagactcattaggtaacattgagagatataaagcaagactcgtagccaaaagatttaatcaaaaggaaggaatcgattataaggagacattttctcctgtgtcgaagaaagattccctccgtatcatcctagcattggttgcacattttgacttagagttgcaaaaaaaggatgtgaaaacaacctctctcaatggaaatctagaggaagaggtttttatgaaacaatcataaggatttttctcttgtgacaatgagaaattggtgtgtaagcttaagaagtctatatatggattgaagcaagctgctaacacagccaacaagggtaattgatgtgtaaagcttaagaaattggattttgcttatcaaaatttaatttaaagagagcagtatttctttttttttaagtaaaatttgtgcattagcacattttttattttattttttattttcctctcttatttattttttaagatatatacaaaagttgttaaagagagcaattttttttaaaaaaaactaaaattttctaaataatctagtctagcatattaaaaaaaattaatgttttgatataattatcaaccacttaaaactatcgtggcatgaattttaaaataattattaaaaattcaaaaagttgtgacaaataacaatttatgataggagattagtataaatttcacactattattataatttaaaattaaatccaatttaataattaatattacgtttcatattaataatgtcttaattgtatgttttatttattattattgttatttaactaaatacttttttatttattcaaattaaaaatatatttaataagtattatttttattcattttaaatatattatttataaaatataatttttttccattataataattttaaaatatatagtatatttataaaaaaaaaggattttataatacgatatttgaaatcaacggtaagtttaagatgataagaaaattaattcatcgcacttaaagaaagaatcattttctttaaccatggaattcatccaaagcacaacgatgctgcaggagaggatccgcatcctaccaatgccaagccagccaaaaccagcttaaaccaaagccctatttgaaaagaaattggccaatttcatgcagcccacaatccacaattgcccaaatcctggtgtttttctttgatttgctggacctggttgcttgaacatggttttcgataacttctccacaattgccttacttacaaattaaaggattatcaatttatgtttacaagtttatgaataactttttagtaattaaaatcaattttatttgcaaaaaagtataattctcgcaacacatcaacataaatatttttctattcatttattaatttcttcatggtagttgcacacacacacacaaaaaaaaaagaagctcaaatgttcacttttcaatattaaagcaaatgcccatttagactacgtacataaaatgtgtgtcatgttggataatatatcattcaactggatatgatgcttagtagtttgtttcgataggtcttccccaagattgccaacaccaattgtgcttagtccattggggattcactgtggagttggcctccaacctcttaaatttcttccaatcacgtagggccaccttcatatctgccacctttgcagtgatgctcttacaacaattggcatggattatggcgactgccctaaaatccttgctatcttggcaaaatccactaaaataaagggtttccaaaaacctcaccctaagtcctaggtgttcaactatgccacttctaatgaggtcaagaagcacatcttgttctttttttcctgtcgcattgtccttttggccataccatgtttcaaataaagagatggtcttgttgtttgacctgacaaagtaaaatccagtgttgatcagatgtttttttgaccaaggatcaccaagatacaagtctgtgctgatttggaagtcttctgtctcattcttgctcaatcttataaatggatttcttagccacattacatcagtgtcctgtgacaaaaaagatgttgcatatgaattagagaaatgaaaatgtgaaattgatataatttttcattcaactatttaattattttatatgagaagttgaagtcaaattcgagcaacaatattttttgtttcattattaacatatatttggtgcatttactattaaaaggaaatttaaagatttaggacccttcttgtttataaatcttatgaaatataatgagtgcttaatgagacttacaatcaatcataatgtgttacaataaaaaaaaaataatcacaatgtgttatgtgataaaaattgtgtctttctctctctccaacataaccatatcatgttaatccagaatagtagaaaatacaaattcacaatgaatattatgcgcaggatgaaaataaagattttaaatttgaattttatataaagtaaaattgggaaagcaagtatatgtaagtgcaaaatggtttgttactaaattaattttgttataatttttagggttatagttcatgcatttttattctttttttaggttttgtctttatgtctaattcattttactgattttagtatgagtgtcaccaaacaaagtttaggtctaccacaaaattaatacaatatgtcaatggagaaggaacaatgacatccaaaagggaacgtctctttatatgatgaagtgaaggaaattaaaagaaagaaattaaggtctccttaccatacaagaattactcataaaagaaagtggagaacttgtatattcatctccttaattattattataatttcataaagtggagaaaaaagaccaaggcgaaatattagaattgcacacaaaatatttaagttgaaattttattttgaatctaactagcatttttttagcttaaaatgtatttttcatttttattttttaaatatgtgattttagtcttttttaattgagacatttcatccttcacttttaaaaactttataattttaatcttcttttgattaatgtcaaacttgttggtcatgtattttttaattatttttaataattaaacttgttagtaattaaataattaaaaaattcatgtaaataataaacaaatacatgtcaaccagtaaatagatcaacttttaatattagttacaatgattaaaattatgaaattttaaaaaatgagaacaaaatgtctcgattaataaatgagagattaaaatcatgaatttttaaaaataaagaatgaaatatttaaattaaaaaataaaataactaaaatagtatatatttgaaaaaataggaagacaaaaattatagcttaaactttttaatacttagcagtaaaatctttaatttaatagaataatatcataaacatgattttatataattttaaatttctcaaacttcacgaatctttatgtataaatttttaaatctttgttattttcgagtcattatccctccatcaccataattatgattccctattgcaattttttttaatgaagtgcaattatcttttctgaatacgaaaagagaggcgtttttacgcctagacattttgcacatatttgaataatgggatgattacaaatttcaaggtcaactttgaataaaaacaaaactaatggttagtaccccaaaactaagcaatgctaacactctgcatgttgtctaccatatacgttaccccgagacacatgctacgaattaattgaaataagaaacgtagctaacatgacctagagcttcaacctcaaggcacacaactttctaagtgaattttggcaagttcataatgcaattaaaaacttttttttttttataagtttggcatgttcacggtggaaaaagtttcaaagcttgtaattttaaaaaatagttcatgattaaattagttaattatacgagtaaaattgagtctagaatctggataggttattttaaaattaagtaatttaatatttcctatgggtcatattatatatcatttcaataaattaacaaaatattaattacttttcaacaatatcttcaattttataataaaaatgatacgtgcattgagaattgagatatgtaaagggattcaaaacgatttatggagactttagaacgagtgcattgagatatcacaatggtgcgtcaattcaagtaagaaggttgtaatttgatgagaggaaaggaaaagggagtgatgagccgaaggaattcaagcagggatcgaagacgtaaaggttatgcaaggtaaagatggagttcatgatgataataatcataatttgtagaggaaacggagaaggtaaaggttaatgaggaggtagatagttgagtatttcagaatcaaaactggtcatcaaagaagggagttagagatttgagaaaaataaaagtgaatacaggtactaatacgagaagataaaaggagatgtacgtttgagaatgtaaagaagaaaaataatttggatatggaatgggaaggaaaaaaattctagtgatagcgagagaaacatgactcttattcatggagggtgtcatgattatgataccatgttaaaaataagatactattacgtaccgtaaaaacaaaactgtagccacgtttaagaacttccaagaggaattgagttcttctccacatcatcttgatgaaatcttgagacatgtatattttctcaccttcaaaaccaacaccatccgtttctagtatgaagcaattcaacctcaaaaattggcatcgatcataggccgttcgatcaacagcaactacgaggaggtgatcaatgagagaccttgttccttctccaagccaaaaactaccaagaaatatatcaagcatggtggtgtcactatctacatcttgctctacataggccttgtttcccattgaggctttggccaaagcatagtcaaggctatctccatatgcttcaacattagtggtggtctacaatgtatgcacaaattaaaggaaaattaaaatgatgaaaaattattgcaaaaaataaaaaaacaaacccgatttacatgcttgatactaaaaaaaatcatccatgggattaatgcaacattactcttttgattatatataaaactgaaattaaatttcagccggattataagaacaatataatactcatgagttatgagacactcagtttctgattaaaaaaaatatataatacacatgatatgttttgatggaaaattacatagaatatgggtgattgaattaacttacagaatttgattgctcgcatagtggttccttcttggataacactactaattcattggagaaagaggaggaccagttgtacagtaaaataaccccagcaaagagtagtattaccgctgcaaaactcccaagtgtttgtttagggttatccatgattctctatctctagctatgccttttttgtgagaacacaaaaccaaaattgagagtcagtcctattatttatatatattggtgctttcttggagggaggttaaaggtatggctattgtagatcgaatgatcatattgtattaatgaggcggagagaagtattcttatttttgttccatggtttgagaagtattattggtgctttcttggagggaggttaaaggtatcgtgtgcattgtggttcagttaaacagtttgaaaatgcaatttccgtggtaataattaaggatattctttgctgttgacctaaattggatgcaatgcttatcttttttttgttaaaagaattaatttttcaatttttaagtatttaattattatttttttgacgaattttaggtatttaaattgttgtcaattatatcctactaattttatatgctaaattttaattttatcatttattcaaaacataggttatgtttgataaaattaactgaaaagttggctagaatgtgaaaactaatttatgactaaaaattagctaaaagaataaacgttagtttattatatcataaatgtttagtaaaattatttattaaagtatatgaaaaatataaaatgatataaatgaacatattcatgtgatgttttatacaaatttcaattttattttcttgataaaaatatattttaaagtatttacaagtttagttttaaattaattttaaacacttataactttttatttataaaatatccagaaaaataaaaatactacataaacttattttatttcattattaatatcatatataataaaaaggtaagaaaaccctatcatatataaaaataataaaaaattatcttaaataaaaaaatctaataaatattcaagaacaaaaaaaatataaaaaaagccacaaactaacattttaaaaatatttaaaaaaatactaaaagttatcagaaaacttgtttatcaaatagttaaacaaattttttaattattaaaaaataaaaattagttaaaatatcttatcaaacatattttatatatgaaaagagttataaataatgatatagatattattttttatttacttttcaaataaaataaaagatgtaaaaaagtataattaagttctgatacctttcatcaataattcaaattcaaatatatcttaaacacccccctaagttggtgcatgaatatcgatcatgcccaacttgtcaattgcttcttcaaacactcttctaggaatgactttgattagcgataggttcaggaggtgcttcaggatagtccatgtaacaccccgtatgcatccggtgtattaatatatattatatcaaataagcgcataattactttaattaaaaggccgtggaagcgatttcaaaactatatttcttgattcattatgtatggttcgcgttaagtactcatcataaacataatcacaatatgtgcacacatatcttccctctataggggtacaaggtatatcaaaatatacaaaacaaggagcatccatgctctcaaagtgctgcaacagctgtccctactggggccttctatcctgggaaccgtcatctctgccagatgagtctcctgcaaatcataatccccacacgggataagataaacatctcagtaagctcagggtccttggaggcatctcctccaccctggctcgcttccatgacacacatcatcaaggcatcacaatcaatggcctccaggccctcataacaatatacagccaatcatctagctctaatgtatatatgcggaactacgccgccatgatgcatcattagcagcatcaggactctcagtcctcagtgtgagaccggaatcacacccatgtcatcccatcgggagctaccccttatgcatggacgcacgtatatggcacctctgagaataggcttcaaccgcgatgagaccacctatctcttggtcttaagggatcatcatcaccctttacgtgagcaaaccaaactaggaggtgcactcttctcccagggaggtccatatctatctaactggccagaagatctgatcacaggtatccacacatacaaggcatagaatcatgcatacatatcattatgagaaagtaacaaccaattcaatgcatgcatcatgaatgcaaccatcactcccttggagtatggtggaacacagcagtggaaaacactcctaagaaaccaagaacttacctggcaaagtcgtgctctgcagttcagtccctgaacggtagtctacgccactgacaccctcggtgtcacgccctatacaaggcatataagctcaatcaatcatcaattcgaccatacaaggaacataacaacagttctcaaccattacaatgaaaggaagcatcattcctttccataaaaacatctaagtcctctatcttaaggttatcaaagctaatcaaatcactagacaatacatggaccctcagtggtctatctcggcctagcccaggcactagagtctccacaagactcggtacaagacaaaacaaagagctcaaagctctatacaggccaaatactcaaaaatccataacgtggtttgaacagtttctttcacacaatgtagccgttcatatagcctctcaggcacatatagagtaagtatcaaggctcatgcatgttctatgatcatcaattaaccaacaaaataccaacacatgcatttctcagagccaagaagcaaagtccatgaaactaacatatgaaagctaatccttcatcacatcaactccctaaacatacttttctaaaggactcaaggttaatttcaactctagcccaaaagggtcactattcatcccaaaatcaaactcacaaattaaacgctaaaactcgagtttcttatctctaagatgacaaggaaggctaaagaactactcccccaagcttgggtgtttgtgaatcgcctcctttcctcgccgaactcgaatttttccaagttccctagagaaagggatttctccgtttggtggtttttagggaaaagagatgaaggattctagctcacaagagggttccctacaagttttatgtttgaagggaagtgttttgatgaactatggtgaagataggaagcttccctaggcttcaatggctgccagggtcagaggaagaagaagaagaaagggtttttcccttcaaaaaagcgtaaatgacccttatatacctgacctgcctgagcttccgcgctgttggcaccactctggcgctaccggcgctagttcccagtgtatttggcactaccggcaccacattctagagaaaatggctttctaaagcaattctggcgctaccagcgccactctggcactactggcgccagttcccagtgcatctggcgctgatggcgccactctggcgctactggcgccaaattccagttagaaatggccttttgctacaatttcacgctactagcgccactcccacgctactggcttgagagttttttttttttaacccaagggttattatagtccacaacaggtgtttcagttatgtgaggtagaaagagaattgaaatacgggaaaagattcaaaacaatcaaatgttcaagtcaatagactctagggctggtctgtgaaggatttgaaacagtacaacgagcttcacatcaatgaccttatggaataatgcattgagctagaattcaaaactgagatatgagaatgattcaaaattggtttgtggagactttagaacgagtgtattgagccatcacaatggtgcatcaattcacgtaggaaggctacttcgagggaaggaaggttgtaatttactaatttagtgagaggaaaagggagtgattaacgatgaaataaggtatgaagggattcatgtcaggactgaaaaaacgaaggttatatgaggcaaagatgaagttcatgataataatcatcataatttataaaggaatcggagaaggttaaggaagaggtagatagttgggtatttcagaatcagaatcaaccatcaaagaagggagttagagattttagagaaataaaaatggaatacagttactaatacgagaagataaaaggagatgtacgtttgggaatgtgaaaaagaaaaataatttggatatggaatgtggaagaaaaagattttagtggcaatggaagaaacatgattcttattcacggagggtgttatggcttcgataatgttaaatataatatactgataaattggaataataattccttattcactcattcacttatatttcacatattagatgaggtatatttatatacaagtaatgttaacaacctgaacagtaaacaatagttcaacttaagaaataataattcaaacttcttatctaaattattttaacaatatattcctatttaagataaacaataattcaaattcaaattacatcttcaacatttacttgtttttattgatcgatctttctcatgtttaagtgaatagaactgaaatagtggcataaaactagcttgcattcttaatttgttttcttctctagtttaattcaattttttttttgtggtgaagcctagtttaagtcaaatactacaccttaattatgtgccaaaaaaaatactaccttaatataaatttaaagggagacgtaccatcgaagatcattagagcatctttagtggtgttccggaaatactaagatatcggggtaaaagataagagaatctatttaatcaattcaaatatttgaaagtcgatcatatcctatcaatcaagtacgtgataattctaatcccagctaagataattgttcattatcttctgttattatcttcttaaatagattatctacaagccatggcccaaggcccataattcacaatataaatacagccctccaggtattcacaagacacacttttctgactctctctttcaatacacacttagcacacaccccacgtccagattgtggtgtttctccctgcaagtgtgatcttcttccctgaggtgttctttcaccatagacattctcaggagagagagagtttgatcctatagcaagtatccaacgaacctctgttggaaccatattcgttcttccaggacggaacattggcgccgtctgtggggacgataaatttcgaatcccaccaactctcaatggctaacactagaaggcatcagatcgttcgacgtgaagaaccacccaagaatccgaatccggagaatgtaatggtagaagatgcattatcccacacggactcatcccgtacgggaccagctgcgcatgtgtcggccaacacaccgccggtcgcgcaagaagatccagaaacctctcagcgtttcatcaagaacgctcttcagcccttgttggctcgaatggagaatctggataagcattacgaacttcaacgtcaggaagatatctagcggctaattgcccagttggaggaacgcagtaacagaaggcgagaagaagaacgttggcaaaatgccgatcacctagaaggccatgcaggaacagacccgcctcaggcagcaacaaggaggcggagactaaagacgtcggcccgcactgctggagccggccacagggacccgaccaaccattccgagcaggggagagtatctcgttctcatcacgagacacttcaactctcctcagccatgataccgaaatctgctgcaaaaagatcaacgggagagatcatccgtcgacctggtcaaggcgatggcacatatcgaagaaagtaccgtcggggtcattaaaataacagcccattcgtcaaccgaatagtggatgctcagttcttggaagacttcgacggctcgtttttgtccaaatacgacgggagccaggacccacaggtccacattgatgaatttgacatgcagatgtgtgtgagaggtatcgacgagccaatcatctcacacatttttgccaccactctaaccggggcggcccagacttggtttcattccctgccaccctggtccatccgcaactttgagaattttggccagaagttcttgctgaactttgcaaccagcaaaaaacagccgaagttcgagtttgccttgggcaagatacgccagcagccaggggagacgctccagagttatctggaccgattcaaagaagcggccttgcaagtccaaggtttggaagaaaaggtatatgtttatcttatttctgccgggctcaatggatcttcccgcctcgccaagtctatttataaagaccctgtgaggtcattaaacgagttcagagtccgagctaaaaaatatttggagttagaacaaatggagatcgcaaactcggcaccaggggaaaacaaagaaccttcctcgccttggaaccgacgacaggagaatccccaggtcggaccgtccagccgacatccagtaaataccccggcaggccgaccaccacggagcagtcccgaccctcactccaggcccgggaagtacgagttgaaatatcacaattacgctccgttgaccgtcccacgtggccaaatatggaaggaggttgccttcaccgacatgaggaaagtcaaccgacctcctccgatagtaaggagagaaggactggactattcccggtattgtgattttcacaatggaccgggccatacgaccgaccagtgctgggagctccgagacgcaatagaaaaatttgtacgagaaggcaaactgcgacaatacgtgatccgaactcaagggcaccacggcaagagaaaagcccagcacgagagtgagcaacgagaggacaagaggagcaagaaagacgaagaattctcagagcccgagttcgaatgcaacgtcatcatagggggagcaggaatgggagaaggaggcgatacagccaaccaacggaagaaatacctcaagtaacgtcggtaagagaccgaccgaggttcaaggaaagttagccgcgagtcggaaaggaccttggacaaggagcatacttactagagacatcggacgacaagcaagtcaaacggacttggaacgaggacaagctaagaaatactatagctgacaaagtgcagccaagaaagtccatgtgttttcctttagttggctttgagcccgtcatcggaatcatggaccccacgtgtttccctttaattggctattgagcccgtcatagggatcgtggattattatcttaaccatgtgttttcctttagttggctttgagccattcatcggaatcatggacccatgtgttccccttcagttggctattcagcccgtcgtcggggtcatgggagacccaatcacaattgatgtatcatgtgtttctcattagctgataaatatagttcgggatgtacaacccgcacaaatcagtcattgagatcatgaaaatcttatcttcgaagaatattaataaaatccttattataaggaacttctcattgtgcacaaattttgaatgcttagtcgttgttttgtattatctcggccctgatcaagccgacgtaactatcatgggtgaatcatcgggtcggccgaaagaattacacttacaatgatgttacaaataccctgacagttgctaagtcgggaaaaagatcccagaacgatatctaaaagcccgaccaatggtcccggccagataaacagtaaaattgggaacaccccaaaactatgtctaaagcccgaccaatggtcccggccaaatagacactcggccattggagccgaaatacggaagaataatgaagagactaaagacatcgtacaatctcggggaggtcgactacctcggctcagattccccatacgtggtcggccctatacgaggttggccttatacgaagttggctcgacacgaggtcgatcttgcccatacaaggtcggatcgaaagtctcaaatcataggaggtcggttaaaggactgatcaaaccattgtacatcccggtcatcaggaatactggaggaccgggacgaggtcggtttcgcacgaggtcgggtccaacaagatcagctccacacgtggtcggccctatacgaggtcggccttatacgaagtcgaaactcagtgcttcacaaggtccgaggtcccgacaccaaacggtcatctcggccgataaaaccagaaacccgaatataaagaaaatataaaatcgaggtcattcattcacctcggccactacaatcaaccagagtgattcattcaccttgaccgcgacaactaacagaaatgactcatcagcatcagaaagatatgggcgcttagtgcagctcggcagatcagagtgctaatcaactgagctggggggcatctgttccgcaaatactaagataccgggataaaagataagagaatctatttaatcaattcaaatatttgaaagtcgatcatatcctatcaatcaagtacgtgataattctaatcccagctaagataattgttcattatcttctgttattatcttcttaaatagattatctacaagccatggcccaaggcccataattcacaatataaatacagccctccaggtattcacaagacacacttttctgactctctctttcaatacacacttagcacacaccccacgtccaaattgtggtgtttctccctacaagtgtgatcttcttccctaaggtgttctttcaccatagacattctcaggagagagagagagagtttgatcctatagcaagtattcaacgaacctctgttggaaacatatttgttcttccaggacggaacaagtggtaaatctcaaattaggatcttagactactctttggtagacctcatattgtcaaatatgattaaagatctctcaagatatcttccatttttttaagagtagatctcattcttagatattaaggagagagaaaaaggaagaaaatttattttggacaatgtgcagatcttaagagatcttctacaagaactcatcctccatgttggagatctctttaactcctttattgatagatcgagtaaagatcagatcttgagttcaagatctttactcaaaatcttacactaaagatattcttataaatagaataacatttatttgctaaatcccatgtcaatatttggttgtttttgcattaattatttacctaattcatccattaagcaaggtttgatttgttaccaaataagtcgatacacgtcacaccttttcgtataaagttttggtgcaagtaacattctcataaatgttgtgaaaagagaatttattgtactcatattgagaaactgacttagttacgcattttcagctttgagcaatatgttcgtagtttcttattttcttatttttgaaagaactgcacgagaaattgaaactacaaaatattgaaaataaaataataaagtaaaaatagtttgaatttcattaattttcgtaattattgaaaaataatattccaaactaaaaagtttttcaatttttttcttccttccattctcttttttgatttgtatggtaagatgtaatcatgggaattgtatgattatttatataagatttaatctttcatccatctcatattatttttttgacatcaatccatctcatcatgacttcatatgttaaaatcctgaatgcgaatattgtaaaaaaaattattaattaaaataattaccataataaaatcatttttataataaaattgaagatattgttgaaaagtaattaatattttgttaatttattgaaatgatatataatatgacccataggaaatattaaattacttaattttaaaataacctatctacattctagactcaattttactcgtataattaactaatttaatcatgaactattttttaaaattacaagctttgaaactttttccaccgtgaacatgccaaacttattaaaaaaaaaaattaaattgcattatgaacatgccaaaattcaatagaacgttgtgtgccttgaggttgaagctctaggtcatgctagctacgtttcttatttcaattaattcgtagcatgtgtcttggggtaacgtatatagtagacaacatgcagagtgttagcattgcttagttttagggtactaaccattagttttgttttaattcaaagttgacctagaaatttgtaatcatcccattattcaaatatgtgcaaaatgtctaggcgtaaaaacgcctctctcttttcgtattcagaaaagataattgcacttcattaaaaaaaaaaaattgcaatagggaatcataattatggtgatggagggataatgactcgaaaataacaaatattgaaaaaaattatacataaagattcgtgaagtttgagaaatttaacatatataaaattatgtttatgatattattgtattaaattaaagattttattgcaagtattaaaaaggttaaactataatttttgtctccctatttttctaaatatacaattttagtcattttatttttaattaaaatatttcattccttattttaaaaaatttatgattttagtctctcatttatcaatcgagacattttgttctcatttttaaaatttcgtaattttaatcattgtgactaatatcaaaagttgatctatttacttattgacatgtatttgtttattatctacatgattttttttaactatttaattactaacaagtttaattattaaaaagaattaaaaaatacatgaccaacaagtttgacattaatcaagaagattaaaattataaatcttttaaaagtgaaggacgaaatgtctcgattaaaaagactaaaatcacatattaaaaaaaatgaaaaatacggctgatcatcctcttagactgatcatcaccttggtaagcaattgtctaaaaaagtgctagttagattcaaaataaaatttcagcttaaatattttgtatgcaattctaatatttcgccttggtcttttttccccactttatgatattataataataattaaggagatgaatatacaagttctccactttcttttatgagtaatccttgtatggtaaggggaccttaatttctttcttttaatttccttcacttcatcatataaagagatgttcccttttggatatatgtcattgctccttctccattgacatattgtattaattttgtggtagacctaaactttgtttggtgacactcgtactaaaatcactaaaatgaattagacataaagacaaaacctaaaaaaagaataaaaacgcatgaactatacaaccctaaagattataacaaaattaatttagtaacaaaccattttgcacttacatatacttgctttcccaattttactttacataagattcaaatttaaaatctttattttcatcctgctcataatattcattgtgaatttgtattttctactattttggattaacatgatatggttatgttggagagagagaaagacacaatttttatcacataacacattatgattgattgtaagtctcattaagcactcattatatttcataagatttataaataagaagggtcctaaatccttaaatttccttttaatcgtaaatgcaccaaatatatgttaataatgaaacaaaaaatattgctgcacgaatttgacttcaacttctcatataaaataaccgaatagttgaatgaaaaattatatcaatttcactttttcatttctctaattcatatgcagcatcttttttcataggattctgatgtaatgtggctaagaaaatccatttataagattaagcaagaatgagacagaagacttccaaatcagcacagactcgtatcttggtgatccttggtcagaaaaccatctgatcgacactggattttactttgttaggtcaaacaacaagaccatctctttatttgaaacatggtatggccaaaaggacaatgcgacaggaaaaaaagaacaagatgtgcttcttgacctcaatagagtggcatagttgaacaagtaggacttagggtgaggtttttggacaccctttattttagtggattttgccaaggtagcaaggattttagggcaatcgccacaatccatgccaattgttgtaagagcatcactgcaaaggtggcagatatgaaggtggccctacgtgattggaagaaatttaagaggtggaggccaactccagagtaaatccttaatggactaagcacaattggtgttggcaatcttggggaaagacctattgaaacaaacaactaagcatcatattgagttgaatgatatattatccaacatgacacacattttatgtacgtagtctaaatgggcatttgttttaatattgaaaagtgaacatttgagcttcttctttttgtgtgtgtgtgtgtgtgtgtgcactactgtgaaaagattaataaatgaatagcaaaatatttatgttgatgtgttgtgagaattatactttttagcaaataaaattgattttgattactaaaaaatgattcataaactcgtaaacataaattgatagtcctttaatttgtaagtaatggcaattgtggaaaagttattgaaaaccatgttcaagcaaccaggtcaagcaaatcaaagaaaaacacttcgttgtgctttggatgaattccatggttaaaaaaaatggttctatctttaagtgcgatgaattaattttcttatcatcttaaacttaccgttgatttcaaatgtcgtattataaaatcctttttttataaatatactatatattttaaaattattataatggaaaaaaatatattttataaataatatattaaaaatcaataaaaataatacttactaaatatatttttaatttgaataaatagaaagtatttagttaaataaaataataaaaataaataaaacatacaattaagacattattaatatgaaacgtaatattatttatttaattggatttaattttaaatacaataatagtgtgagatttatactaatctcccatcataaattgttatttgtcacaactttttgaatttttaataattatttaaaattcatgccacgataattttaagtgattgataattatatcaaaacattaatttcttttaatatgctagactagattatttagaaaatttaccttaaattttagtttaaaaaaaaaatactaatctctttaacaacttttgtatatatcttaaaaaataaataagagaggaaaattaaaaattaaaaaaaaaatcgtgctaatgcacgaattttactttaaaaataaaatactgctctctttaaattaaatttggataagcaaaatccaatttcttaagctttacagaccagttacccttcttggctatgttaggagcttgtttcaatccatatatagactttttaagcttacacaccaatttctcattgtcataagagaaaaatccttcttgttgtttcatataaacctcttcctctagatttccattgagaaaggctgttttcacatccatttgttgcaactctaagtcaaaatgtgcaaccaatgctaggatgatacggagcggatctttcttcgacacaggagaaaatgtctccttataatcgatttattctttttgattaaatcttttggctacgagtcttgctttatatctctcaatgttgcctaatgagtatttctttgtattaaaaacccatttacatccaatggcttttgcatcatcaggcaactgaacaagatcccagactttatttgatgtcatagaattcatctcatcatgcatagcatcaaaccataaatttgattctttacaattcatggctagtgaaaatgtttcaagatcatttgcaactcctatgttataatcagactcttgcaaatacacaacataatcactaggtatcgctgatttccttactctagtagattttcgtaatattgagacatcggcttcttgaggaacttgttgttcaactggttggtcaacaatttcttcgtgttcctcataaacaacttgatctactggatcatcagcaggttgtgaatcctgtatgactagttgtataacacccggttgaactggaggggtattttggacaataaccagtctcacgtttgaagtggatggttaagcaactaaatgatccttctcaaaaataaagtctttgtattgatcgctcccactaatcaagtcattctcaagaaatttagcatttcttgattccacaatcctagtgttgtgagatggacagtaaaatctatatcccttagaattttcagcatatccaatgaaatttccactaatagtcctcgggttaagcttcttttcttgtgggttataaattctaattttagacgggcatccccaaacgcgtacatgtcgtaaactcggtttccaacctttaaataactaaaatggagtttttggaacaaccttagttggaactcgatttaatatgtacattgccgtctctagtgcctatttccacaagaacttaggaagcttggaactactgagcatacttcgtaccatatccaataatgttcgatttcttctttctgctacaccattctgattcggagaaccaagcataatgtattgggcaataatcccatgctcttcaagaaaccttgcaaatggaccaggtgcttgtccatcttcagtgtatctaccataatatctccacctctatccgatctcatgatcttaatttgcttaccgcattgattctctaccccagacttaaataccttaaaggcatctaaggcttcatacttactattaagcatgcagagatacatgtggctttccctatgcatacatctaaacctgaattacttccctaggaaaagactctaagaaagtaaaatattcaattaatgaaccccgaatcttgactattactcccgctttcagttagtgttcattgctaagtgatcgctcgctatctggctggaaaaggtggtccggaagctttctctctcccagcaagcaagacgagatcaccacttctctcagtaatggatcgtgaataatcatctataaaagagatgaagtatttctgaccatatacgtccatatcaggacaacagatatttgtatgtataatatctaataatttagtactctccttggcaccctttttagacttatttgtgtgatttcccttaatgcgatttatacaagtctcaaaatcagtgaaatctaaagaactaagtactccatcattcactaatcttttaattctttgaatggagatgtgtcctaatctccggtaccacagcatagaggaatcctcattcataacacatcgtttaatgccaatgttaacatgcatagcgtcataagtggtatcattttgcaaattaatatagaaaagaccatcacataaaataccattccctatgagatcagaattataaaataaactgaaagatgtctcataaaatgaaaaggaataaccaaatggtacaagtcttgaaactgaaattaaattcttagaaaaactagaaacataaaaagtattttccaaattcaaaataaaaccacttcttaaaactaaactacatgtgccaatggcctctacgggtgaactcatcttgctgcctgaatagatgcatagttcactgcccactcgtttccttaggttttgcataccctgcaaggtatttgaaacatggattgtagaaccaaagtcaatccaccatgtgttatgatttatgttaatcatattaaattcataatagacttaagagtaagcatacctttcttttcaaaccattgtttgaacttagaacattccttcttcatgtgccctttctttttacagaaaaacacctggatgattccttcttcattccagtctggggtggtgttttaccagttcccttgttcttatattttttcttctggtcatttttctcaattgtcatcagagaactctctccttattctaattgcaaccttccttcctcctgaacacacatggtcatgagctcattaatagaccatttgtccttatgcatgttatagaatattttgaagggaccatatggtgctggaagagtgttcaatataaagtgaacaagaaaagtgtcagacatatccacctccaaagttttcaattgggctgcaatgtccctaatctgcataatgtgctcactcacaccccttaaagcagtgaacttcatcgatgaaaatctcatgattagagtactggccagggcttttcctgaagtctcaaattgctcatcaatagacttcatgagcactttggcattgttatgctttgtcactgaacccctaataccaacagagatcttagtcttaatgaacatgacacacaaacagttggatctttcccatttttcaaaacgatccactgcatttggctcaccgttctcagtaatagctggtggttcaggtttctgatagcttcatcaatgtccatatatcccaaattcaggagaattctctccttccaaattgggtaattgtcccctctcaattccggaacttcaatagaactaacaggttgtacaactgcaaatatatgcttattattaaaattttaggcaaaaataaatcattatcatgctttaccaatgtaaaacatgcacaaagaattatgaatttagtgacataaaatttgccaataggccaaagttttaattcaataaaattcatatgaacttaatgataaaacatatcagttatatttcctaatccctgtgggcaaatcaagaacataacttaatatttttatcctaattaatcatataaaaacatgataaaaaatcttgtgagatgatatttatcatattacatacaactaattacaattaatgttatttttgttgattcaagtaaagcaagcatcaatgaacaagaatcaaaggctcaaaagttttgtgctttcaacatgcacaaaggcaaagttccatggaaagcattgaagaccaatttgattaattgtaaaaggaagtatatgatctgataatccaattgtgcacatcatgaattaatcattcatttaggatcattagattaaaaggtttaatcaaaggcagtatataactaaggcatttaaaaggttaagtttttggaaaaacaaagttttactgaagtaatcgattacacatatactggaatcgattattttgttcttcgtgcctttagaaaacaaatcatgatcattgtaatcgattacatatcggtttaatcgattactaaggctttttatgaaaaatggaactctctgtcttaatcgattacatagagttggtaatcgattacatgcctatgcatatagacttagaaaaatcacagctcgctgtcttaatcgattacatatcgtattaatcgattattaagctcatttagaaaaatatgactgactggtttaatcgattacttcacggaataatcgattatattgttcatagcccaaacccagaaattattaggagcattttaatcgattacagtcttgatttaatcgattacaaatggtaaataatcgattactggagcgtgtttaatcgattattttcagttaaaaaatctgttataaatagaactcacttctctgaagtttgtaacttttgatttttcgaattctgggctttcaaaaacattctgagttttcattagtgagtttctctgagttctaaacatacttagcttcacaaaatctcatatgggtttttgattcaagaaggtgaagcttcattcattcaaagcataaggaaatgactgcatatgtgattgtaatttgtctttcaacctgagaatcattcattgtgcattcattcttggattatcaggtgatggctttccttattctttgatggtgtaaactgttccttgaatatttgtaaggattagtctattataattgagtttcttgcaagtgtgagatagtgtttctttaaaagacagctgagtagtgttctcagtgtaggttttggtctctaaggatctaatagggttttggatctctgaacttcatctagggttgatgaagagaggcttgtaaatttgcttgtaaggataatttttacaatagtggaactctactctagtgttgagtagaagaactggatgtagcctcatagggtttgaggtgaaccagtataaaaatctgagattaatctttcttctcacctattcatttcttaattgttttgtttgtgaaccaatttcattgcacagaaaattatactttgttttctattcttcttgtaaaaggaatttgattgaatattgattcttggttttgaaataatattgaaagtgataaagatcctgtggtaatactctgattttaaattttaattggacaaggttcaaccaattcacccccctcttggttgtgttgaagtattcttatcattttcaatttttcttatgtgatctagaggctctgaatttataatttaactaactaagggtgctatggccaaaccttaagtaattaaatcataaagatcactaaacatttatttattcattatacatactttatgataaaactatcaaattatattttccatttttattggtaacttaataatataatttaatattttatcttaattaaccatataaaatataacaaaattcttgtaggataacatttattatatcatatatgatcaattatgattaatatcaattatgtgttttctttacaaattattcaacacgtgttttgccaaaaattttggtaaccttgcaaacatatatgaaggaaacctagttttttacttttgatgctattttgtcattttgtgccaattttataatgctttgttgtatcacatacataagtgataaatttgcatatcacaagcatcttcctcggtcaaaacaagtgtcaagcaaaattttaatatgaatttataaagcataagacgacaaaataacatttcttgtagcataaaagcattgaaaacaagaatttgcttttacttttcagagtaaaggtacaagaacatgcacgttatatatcttgataatgtcaaaatcaaaaggaattgtcattttgaaacttaataaaacgacacacacttaagttgtcttcaaccttaagcaaaagggtatagaagcacgcaaagttttaaatcacggtttctaattttaaaaacttcttttcataaaattttacatcgtttttcatgatttaaagtctagaatcattagaaatctattttctttatgattcttaaaatcaaaatttattttaagactttgaatcaaaatatccagtaaaacccaaaaaactcaaaacgtaaaaataaggcagaggttgaacaatgctctgataccaaatgttagatttttatatacttaatgatctaatcattttcacaaataatattagatcaatgcggaataaaattgaatataaatacctctcgtcattgctccttgaattgggttgtaatactgcaatgtgaagtgatttcttgagtcttccaaacttttctctcaatttgcattagatggtgtatatgcacttatatgttagtgagttcacagatcccataaattgaagacacacacctatatgtagacattttccatcaaaggtggttttgtgtgtatgattagaatgggaagttaacaacgattatgataaggggtagttaaccagaggaatagttaatcaattaaggttggttacaaaataaaaccaacagattttgccaagatagcaaggattttatggcagtcgccacaatccatgccaattgttgtaagagcatcactgcaaaggtggcagatatgaaggtggccctacgtgattggaagaaatttaagaggttggaggccaactccacattaaatccccaatggactaatcacaattggtgttggcaatcttggggaagacttatcaaaacaaacagctaagcatcatatcgagttgaatgatatattatccaacatgacacacattttatgtacgtagtctaaatgggcatttgctttaatattgaaaagtgaacatttgagcttcttcttttcactactgtaaagagattaataaatgaatagaaaaatatttatgttgatgtgttgtgagaactatacttttttgaaaataaaattgattttaattactaaaaaatgattcataaacttgtaaacataaattgatagtcctttaatttgtaagtaatggtaattgtggagaagttatcgaaaaccatgttcaagcaaccaggttcgacaaatcaaagaaaaacactgggaattaggcaattgtggattgtgggttgcatgaaattggccaatttcttttcaaatagggctttggtttaagctggttttggctggcttggcattggtaggatgcggatcctctcttgcagcatcattgtggtttggatgaattccatggtaaaaaaatggttctttctttaagtgcgatggatgaattttcttatcatcttaaacttattgttgattttaaatgtcgtattataaaatcctttcttttttataaatatactatatattttaaaattattataatggaaaaaaattatattaataatatattaaaaatgaataaaaacaataattcataaaatatatttttaatttgaataaataaaaagtatttagttaaataaaaataataataaataaaacatacaattaagacattattaatatgaaacgtaatattaattatttaattgaatttaattttaaatacaataatagtgtgagatttatctcccattataaattgttatttgtcacaactttttgaatttttaataattattttaaaatttatgccacgataattttaagtggttgataattatatcaaaacattaatttcttttaatatgctagactagattatttagaaaatttaccttaaaatttagtttttttaaaaaaaaatactgctctctttaacaccttttgtatatatcttaaaaaataaataagaggggaaaataaaaaaaatgaaaaatgaattatttagacaaataaaataatataaattgaaaatgccttcttttagttacataaaatttaaaaaggtaaaaataataaattatattaattgaatgttttatttaattaataattatttatttattcaaattaaaaatatactttagtcatcattgttattattttagtatttttatagataaaatacaattttcctattgtaataatttgaaatattatatatatatatatgtttttatatttttaaaataattcttttatatttttaatatgatatttaaaatcaatggttagtatgagatataaaaaaaataaaaaataaaaagtcgattcaaacaatacacaacaaagcacaaaacaacaccccgaacatttactttgaaacgagcttataagagagaaactttaatcacgagattcatccaacggactgtaatgctgcagcagagagctagagaggatccgcatccgccatttgtatgggttcatatagaccaattttaaatttttaatgcttattatagttttatactttgctttgatatgttttcaaatacattatatttattaaatttaataaatatgttttgggtcgattgttaagtgataatgttatatttatagtgatatttttgttgttttgcaatttagtatttttttatttttgtaaatataatttttcattttaatctttttaaaaatatatttgttttatttttcattattaaaatgttttatataacactttgaatagtaaaaaaaaatactttaaatattgaaaaaaaaccttatctaaaacattcaaagacaaaaataaaataaacacattttataatgacaaaaatgaaaaaaatatatttgcaagaacagaaataaaaaatggtaaattgcagagaaaaaaaatatatttaagccattataattgatttaaaaaaaaaaatccaccccccttcttatttgactaacatcaaattttcaaacttttcttttctctccttttttatcagcatttaattttaatttatctatcctctcttctataaagtaaatctaaatctaaaattatgttttgtcaaactaactaaaagttgaaaagttaactaataattgaaaggtggatatcaatagttgaaaattgaaaagttagattattaaattataagttcgataaaattaactgttaattgtagtagttgaaaagtgtaaaactattgaaaaaaatcatgatttatttataaaaaaaaaagataataaaaaattgaataaatatattaaagataaaaataaaataaaatataaaaaactagaaactaatattttaaaaaatgttacttcaattaacattttatgaaatggtaaaaactactaaaaaaaacacttgtttaactaatgaaaaaagttaaaaattaattgaaatagtttgcggaacatagcctaaataattaaaaaaatacaacatgaaatctaatttagacaattgttgagaaattggttcagatttatttaaataataataatatttctttaacttaaatgaatttgaaatatcaaccatttttataaaggaaaatcacgtgaattggaatgttttttttcttcgaatttttatttggtacatataatatatccacgataggggaaattatactagaaatatatctctcaataaaaaaatataaatatattaattattaattaaaaatgttttcacaataactatttgagtgtagaaaataatataataaaaatcttagttaattaaagttataaaaaaagacctgtttaaagttacgttcattttgttgtcaacaaaaaagttacatttattttcatattcaacattttttaattattttgatttacttcctttaataagtaaatgaaatgataaaaaaatataaattggaaagaaaaagcatttatttttataatatatagtttttataatgcatttatattatgaggatagaggagagagaaattaaaattttaattagaataagaagagagaagagtaagtttgaaaatttaataggagagatatttttttaatttaattataattaatatagtttccttaaattagtttgactaaaacaaatcagcttgtttgctttttaaatgttttaagttaaatgataaagtatgataatatttttaaattaaattttgagaaataaaaaattcaattattttttttttttgtattaaatggtctgaccatctagtcaaagcagtttttattttagttaggcttaatttgaccatccttatatatatatatatatatatatatatatatatatataataattaaaccatgtagttagttacacgttggttgcctctcaatatatatagggttctcaattttggttttctgtcctcacaaattaaacggcatagagatagagaatcatggataccaaacaaacacttagtagtttggcgatgataatattactcttaactgggattattttggtgtaccactggacctcttctttctccaaccaattcgttctaactctaaaggaaccactttgcaagcaatcaaattttgtaagttcaaatcacccatattttacattttgcatcaaaacaaaatcatgggaaatcttcatatatctagtttaaattttcaatccttatatatataatcaaaagagaaataatgttgcattgccatatattacttatattttattttgtatcaagtaaagtttatagagtttttatttttcgttttagctgtaatttttcatcattttaattttcctctaatttgtgcatacattatagaccactcccaatattgaagcaaatggagatgaccttgacactgctctggccaaagcctccatgggaaacaaaacagtgataattgctatagtaaataaggcctatgttgatcaagatgtaaagagtgacaccactatgcttgatatatttcttggtagtttttggcttggagagggaacaaggtctctcattgatcaccttctcttggtagcggttgatcaaacagcctatgatcgatgtaaatttctgaatttgaattgcttcaaattggaaacagatggggttgattttaaaggtgagaaaatatacatgtctcaagatttcatcaagatgatgtggagaaggactttcttccttttggaggttctcaaacgtggatacaattttgttttcacggtacgtatttccctttttttccatcttttttctattttttttcagttgattgctctttctcatgtttaagtgcatagaatgtatcggccggtgatctaatctaaaattagtttacttttctctctcttctcttttttgaacttatatttcacacattactttttttacagataatatttcacacagaacttgccaacccactcacaaactatcaagctatcatatatatatatatatatatatatatatatatatatatatatatatatatatatacatgccagcaattatgaaaaacgtattttcaacttctcttcctagctaaagcagtaaaaaacaaacttttctttctaaaaaaagttcaacttctcatatagaattaaattgaatagttgaatatggaagtgcattgaatgtataggtggtctaatataaaattagtttacttttctctctcttatcttttttgaacttatatttcacacattacttttttttacagataatatttgacacagaacttgccaacccactaacaaactatcaagctatcatatataatatatatatatatatatatataattttagattaggaataaatagttccatattaataatattaagagatacaagactaatgaaatttccaaattcaacactggctatattagaaaataatttacatgatggtccttcattttttaattgttatcctaactttgctttaaacttaaaaaatgaacaaactgcatatgctttaaaattatatgtaaaattacctacagatattttttcaagaagattctggagctctaaatttaatatttagaatatattataaagtaactaaaatagattataactttagagctttaagaaaatctaaaaaggatgaaacaataattgttgaaggaaatcttaaaaaatcaaccatacaagtacctagaaaattagatcattacgaagtaatgaaaaatattcctgaagaatggttaatctcatatgtaatagagcaacctaaaataaataatactcaaataagagaaataatacaataagttactaatgtaagattaagaatgaataggtcacagtcattaagagttgataaacctcaaatgatatataaagggcaatcttcaagacattttatagatggttcaactataaatttagattaaacaggattggacaaaagtaatccaaaaataactaggccaatatatcaagaaactaataaatctccttaatactctccaactaggtctcaagtattaaatactttaataagagaagaaccttttaaaatagataaagaattgattaaacaagggaaaaatagaaagtgattttttgaaacatatagttcggaagaaagagagaaaataaggactgaatattataatgatctagaaaaacaagaaattaatacttatttttccattggttttttgagaaaaataagacaataaatcctattactaaaaatactagtatttggaaaactacatagaatttaataatagaatcagcttttatcctccttatatgccctatatttctctcttactcaacccctggatatttctgcttgctcttatcatacatcatcttcatcaaacctagcttaagtaaattttctaataataaattctgaagttttcatacatgttaatttctttcatattatcaatatatattttagtatacaatatcatgataatagtcatgcatatttatgaaagcttaatatttgaatttcaaaatacctacggatatatatatatatatatatatatatatatatatatatatatatatacatgccagcaattatgacactactacaaaagcaccatttgaagacgcacaatctaagacggttgtatgataaccgtcttagaatcctgcgcggtggcatttttgtaaataggaggttattttcaaagatggtcccctattacccgtccttgttcatagcatttcaggccgggccactgtaaaacccgtctttgtttcttattatacaaagacggttcatcttaaccgtgtttgattgcccattttttttttaaaataatttttacaaaagcattaatattctgtgtgccctaattactgcaattcgatcgtgtcttttttctttgtgccctaacccctctgttgtgcactctcagattgtctctcctccgccgcacgccgcccccctccgccgccgaaagatcccgagcgggattactttagggttttctgatcaacctgtttgcgcccatctcactccatctactcactccgcttctggcagcaccaccttcgtcgctctgtcttcgttgaagccaccatcgtcatcgtggaggcattgacgacatattgttgtgctacatatggtatgtgactagttcgattccatttaatttgttttccatggtggcctctgtttccggttttggttttgaccttttatcagttgatgtgtttggtgttagtttgttggcaggcattgttagatttagaattagcataagtccgattgtgggtatttgttgattgcttgttctctgttttggttacctaacacagtccatcatattatatataaattgtgtaaaccttccaaatgcatgttaactaacaacaatgaaaaattttaagcaaaaacggaggattggtagaaactcttaaggtgaaattatgtttgatgcaagtacaggaaactaatcagtagatttactttctttatagctttctctttctctgattttctcaacggattccgcattgtcattccagcgctttatcctccttcagcttcatagtagttaatgaataatatatattcagagggggatcaagatctcaaattaaagtgcttggcccaagttgaattccaaatccaaattacgcttattcgggcttgatcctcaaataaacttccatctgatattctctcatagcttaggcactttggatccgtttcgttctgaaaaaccaaaatataaaataattaattaataaagaagcaaatatcatgatataataatcgttttttgtgtcgacaatattatctaaagtgtgaacaagggaaaaatagaacccacaagggaaaaatcacacacaacagggaaaaactggaatagcaagaacaaaccaagaggcaaggtaaacgagtgtacctccaaaggagctttctccttttacactggcaatagcccaataactgtatattttccaatccccctcttactgaagagaggactctaatttattggagttataattctccaaataacagaactaactaactctcctatccctctcagtggttgttacaactttttgaccctttccttttcctataataaacctgcaaacccaaagtctttcgtgctacagattgttgtttggactcagtcctataagaggattatcaccaactaatcctttatccttaaactatcagtaaaccaaaacacataattttaacccatagaatgctgcagttaaagcccaagtctacatcaaaacagtatatggctctcaatgagtgcaacacttattactctgaattattgtgcaacatccaatatatcattgattaaaaaaaaagcaagttatttatgcttcattgtatgaaacatatcatatcctatccatgacattagtttttcatctttccttgtttatatggtagtggcttttgagggcaggatgtgtatgtgtccaagccgcatataacaggctattggcatgtttgatcctggtgagctttcagtggaacataaactgactagcccagtcttcgaagatcttttttccatttatgtagcaacaatttacttagatttttgtttttgttgtaaacaaagagttttagaagagactagagacgagtaaataagaaaggataagttgtgtcttctaacatagagaaatgggaaatgacacaaatttgttaacaaagttaccctgtcttagtagacaatataggttacggatgtaagcatagggaaaaaggttggggtagcacactgtagaaaagctgaaaagatggtagaatcttgtcttggtttgggcatgtgcggagagacttgtaaaaggcctagtaataaggagactacattgatggatggtaggccaggagttagaagtagagggagactgagaaactataggttcaacaattattaagtatttagaatcagaagtcaataatttgtttatagacatgggtgctaacaacttaattaagtgcttatcataagttgttttataatgaaagaggaaatggatttaacccatttctcatacaagttgtatgttgttttcataatatacggtgaagagcatactaaaaaagctgaaaataacttgtggacatatcataagctattcttgtaagctttcccaaatacttagacaactgtttgtgtcataagataagatcaaataacttgtaaataagcttttctaaatgcatccataatgttaaatgtcattttatgcatgaattaggtggaaacaagatcgttagttaaaagcttaaggtattaggtggaaccacatggatatttatatacttaacatcatcatcatgctaatctgtggtcaaagcaagatactcaatatgcctattttattaccattgaaattcagtttaattatgaaggaatgatagtcacgaggatcaaactcttgactacctagtcaaagaggcttataaatgatatcaacaatgaatcatccaaaagattaaaattttagatggaaacacttgaatggttttatctccctaacaacatattaggaggttcatacttgttgtggtattgacaattctatggactggttttaattttaccatgtatattgttttatgtatagctatttcccagtgatggtttaggaaacttcagtgtttccatttgttatggaatggtctgcgtgtctgtacatataagtgcaattcatgttcttaggtacatgcaaagaataattttgacttcacagttttctgtcttagaattgtggatgtagacatatcctattgtatttggttctggtacaagctggaataattttatattgggttgatgcaatgttccttatttcctttttcaaatgtttgattagaataaatagatagacacaggcataggtatcatttgttttagaatctgacagcccctaatcttgagcctaaagcatcagtcggtaacacaaaagtttgataaaaatcaggcacccccagcacaggcagtttactcattatgtcttcgaacttttgcaccaattttcgattctgtcttctttaaatgaaccgtggctgcattcacatgcttcagctcatttcttgtaacatccatagaggccatgaacttaaaaccttgttctctaatggaaactaagtatttctttgctgcctgtatttcttctgttgcagtctctaacacactaacatctcttggattctccttccacttgctccatgctctcacctctttcaacctttttcttaacaaacttcaactcattcttcaacatatcaatatcagacaatgttgtggccaatttgatttcaagctcttttgactcatttatctctttaatggcctctttcaacttgttccttgtgttttcaacagcttcaatgtctctcatttcattcaaagcgtccattctggccaattcaaccaccacttgttcctcactgccttcctcagtttttgtgctacctttgagaaggacagcatgttggatctcgatgattcgatttccttctctgctcgcagtctgtcctccaaaacagaagccacatcaaatttgcagcatgtagagcagaatgtctttagttcctttatagggatgtgatgatagggatgtgatgatccaccttcctgttgggtggtagtccctttagttcaaaaaatacttgagcatactcctccatcactgctttcaattgctcttgttcttcttctgaaatttaaggctgatcctcaacatgcgctttgttgttggctgattctgactccaccatccatattattcaagtatgtgaatttcaagagcctcttgattttttatttaattaattattggtttgataggcaaatgttagttttgttagatatgcatgtcaggtttagtcagtatcatcagcaaggctgcacacatcgtccgtttggtgctggccttgaaatatgttctcttgtatttgttacaaatcaattaaaatctacgctcttgcatcttggtttttctgcaacagagtgtgacccatctttctttgtttttaaagatacctctcttcatttatcttttggtgtatgttgatgatatcataatcactggcagttctgtcaacttagtccagcaatttactgtcaaacttcactctaatttttcccttaaacaacttgggaagctggaatattttttgggaattgaagtcaagaccgtaactgatggttctattcttctaactcaaagcaaatagataagaggtcttctacacaaaactaaaatggctgaggcccaacctattgcttccccaatggttcctggatgcaagcccactaaaacaggagcagacctcttctctgatcctgttgaagctcagtagttggagctctccaatactccactgtaaccagacctgagctaagttttgctgtaaacaaagtctgtcaattcatggccaatcctattgaaactcactgggcaacagtgaaaagaattctcaggtaaataaaaggttcgttacaccatggcctacttctcaaagcttctactccaggagctcccattcatattaaggccctatgtgatgcagattcggctgaccctgatgatcgcagatctacttcaggagctgctatttattttggtcctaaccttatattttagtggtcatagacaccagcttaggaatgtgtcgagacttgcaacacagaatgataaaaaccatttacaggtttgttcttttcaatggtgcatctgtcctcatttaactcttttcttgaaatttatttaaaagtatcttgcatccgggtcatagtgtcactggttgcctctgtggattcagtaagtatcatatttaaatgctcgcaattccaaattatcctcatttatatgggtttaggcaaaactcaaggtccctgccttctgaatatgattgattttcttagacttgaaaggcatgattattgtcaaggttcattaagatgaattgtcatgttgaaaacaagaatcaaacctaaatattaaataggagatgaaactgtatgtaattgtgactatgtgaacggtatatccttttttcaggttggaacttatcgtgctacatctctgcaagttaattcgaggcctccgactcccggagttgtgagccgaggaattgctcttgagggtttctgtagtatattggctggtctttggggttctggtactggggcaacaaccttgacagaaaacatgcacacaattgacgtaacaaaggttgcaagtcggaaggtagtggtagttggagcagcattcttgatcatgttctcatttataggtaaaataacaacacttggagacaaaatccattattgaattcaatattcttgtccaacttaataagttttcattcctctccatcattctggctgagatggatctaaggatgtgcagtggtttgattttggttcatttgagtctcaaaatatgactgttaatataagatagattgtatgtacacaggctattttgttgtcttgtccgatctctgttgctttattttgtaggaaaagtgggtgcccttcttgcttccattccactggccttggctgcttctgtactatgtttcatgtgggctcttactgcagcattgggcctctctaatttacagtatagtcaatctgccagcttcaggaacataacaatagttggcgtttcactgttccttggcatgtctatccctgcttattttcaacaataccaggctgaatcaagtctgatactgcccagttatctggttccttatgcagcagcagcagcaagtgggccattccgttcaggcataaagcaagtaagtaccttttgccttaaaatgtaaaaaaaggaacaaacaaaagaaagactggctggtatagcttatagatgaatttgtccatcattaattaagtttgacttaattcacaagcctctaacatcttaacggatttatcctgattgaaactgttatcatgtaaatttgtccttaatgacaaatctttacttttgcttgattttcttgtaaattcagctataacttatttcctcttttcaatggtgaagctgattttcagtgtttttggtggtagaagctgatctacttgtatttttttttcctttgttaaccctgtcattgactggtaaccagttgaaactgagaaataccgctctgagctttctaaagttcgtgttgagcttgaaccttgggaaaaagatttgattgagcataatggaaaacttgaagttgcatgtacagaggctaagcttctaaatgaaaaggtgagaatgacttctcttactttcaagtgctattgttctgtccatgccatcaaattattaatcccctctgctgttaacgtgtataatttaaatttcatctgtgttgtgagattttccacattttatgtccttgttatgcatttaacaaatataaaaaacataaacataaataccaaaaaaaaaaatagctgcctgaagctagcttagtcataagatgatatcttagtttcttccagatataacagtttaccctgataagcaacaacatatccaaaaaagggttaaatcataaaatggactgcacataaaactagtaacacaaatcaaagtttctttcccattcactttaattaaaagggcttctttctgacatgcgtgctcaagattcttggggcatacacttatttatctataacgaattactctatacatgtagagcagaatgtctttagattttcctgtaggtgtctgtataatagaagactattcttgatttaatttgcagcatgaaggtgcttctcaagccttttgcagatgctcaaaagaagatgaaaagcatatcagaaacaattaaatcaaaaactgccaccatttctcaaatcaagagtgatatagaaaagtgcaagcatgaagcttcagaagctcagcaaattgaagaagtaagcaatttcccttcttattcttaattttatttctttagcattttttttctgaggcttttggtgatatcattgctcttgatgaatgaaataataattatatattaatacttttagttttttttattctgtttttcacatctgatattgttttctaataaaaaaatatataaaaagaataaacaataaccaataatttaatgcacaaatccaaatactataaaaacccactgtccttcttccaatatctaataataaaaataatgaaaaacaaattattttatatagtgtgcattaaaaacccactctttattaaatgtcatactaattaatacaattcattaaataaatgaaaaaaaatagctgaaaaatgtttaaagtgcctcttttggatgataaaaaaatgaattctttattgttatataaaagatttgactcgtgtgtcatttcttgttgagtattgttgtatattttattttatctcataccccattagttaaacttgttttatgaatgaagccatgaatgggtttaataacttaaactaatatttaaatttagaagctctaattaatgaactgaattttctctcataatgtgtattaatgatttcttttccaatttattatgcaggaccttgattgacaactcaagagaagaggtaatatataatttttctgtattttgattggaaaataatttagattttcttatgtatatgatggaaaagtatagatttctataaaaagtggtttagttggaatagtgacaactaccttgtattgatgtctttgaagctaccgcaaaaagaaaatttccaaaataaaaaaataaaaaatatgaatctaagacggttcccaggatacccgtcctagtagtttaaaaaaagccttcaaagacggtctccaaacatgaccgtctttgtttgtacccttctaagacggttcaagctacacccgtcttagaaacttaaaaagaaaattaaaaaaaaataaaaaagccttcaaagacggtcttctcagatgaccgtctttgtttggcacccttctaagacggttcaagttacacccgtcttagaaacttaaaaagaaaattaaaaaaaaaaataaaaaagccttcaaagacggtcccctcagatgaccgtctttgtttggtacccttctaagacggttcaagctacacccgtcttagaaacttttacaaaaaaaaaagaaaaaaactttcaaagacggtttgttaaccgtcttaaaaagtgtgtactttcaaagacggtggaatcaaggacgggtgcggaaccgtctttgaaagccttctggaaccgtctttgaaggccttctggacgtattttcaacttctcttcctagctaaagcagtaaaaaacaaacttttctttctaaaaaaaagttcaacttctcctataaaattaaattgaatagttgaatatgaaagtatatcatcaatttaacatatatatatatatatatacatgccagcaattatgaaaaacgtattttcaacttctattcctagctaaagcagtaaaaaacaaacttttctttctaaaaaagttcaacttctcatataaaattaaattgaatagttgaatatgaaagtatatcatcaatttaactttacaacatttatcccttcaatctaattcaaatgcaacatatttttcataggacactgatgtaatgtggttgagaaacccatttataaggttgagtaagaatcagacagaagacctccaaatcagcacagatgcataccttggtgatccttggttagaaaaacatccaatcaacactggattttactttgttaggtcaaacaataagaccatttccctatttgaaacatggtatggccaaaaggataaagccatagcaaaaaaagagcaagatgttctttttgacctcattaaaagtggtataattaaagaattgggacttagggttaggtttttaaacaccctttatttcagtggattttgccaagatagcaaagattttagggaagtcatcacagtccatgccaactgttgtaggagtatcactgcaaaggaggtagatttaaaggcagttcttcgtgattggaagcaatttaggaggttggaggctaattctacgataaatactcgttggactaagcacaaccaatgtcaacaatcttggggaggacctttaaaagtaaagggttaagcatcatggttcatacttgtataatttaatcatgatatccgacatgactcacatacttttttatatattttatttatttgtaggaatcaaaaatattaccaaacaatttataataactcatactatatttaatcaaatgagttaagacttttttgtctttatatataatttaaacaaacatttattctaatttaggaaaggaaaaatttgagttatttttctttgtgcactaaatatgaaaagataaaatttaatacatgtttttttcccgtagaaattgaagagatatgataaaaaaaaatctttatgttcttgcatgtgttttaaaaatatacatatgcaagtaaaactactctcgtatttaaggctcgggtagttctctgtttacaatttcgaaagtattaaaaactaaacttgatttatgttttgagttttcgatttcagttttttttttaaaaaaattgttgtaaattaataatagataaaataagtcaattttttttatctttctccattatgagatcatgttatatataaaaaaaaatattggcacaaaaataattaaacattctaaaaataataaaaaattctacaataaatgttaagactaaaaaaataaaaaataataacatactatatatagttttcatatatatatatatatatatatatataaattgtttgtcaagtttttttttacatatatatagtttgcattatgtaacaatatatgtattttatattctttttagttgttatgtatatttattattattattattatattatttataaattttgctattaatttattatatcacatattatgttttatttaattattattaatattattatcattagtatttaattgtatgttatgttttacttaagaaaaagaaagctattggactgaaatcgaggcccaaaacatcaaaacggataagagaaagaaaaaaaaaacaccctgaaaggaaacacgacccagcccactgttaacatgcgcatggatgcgtgaaatgaagtggcagctgcgaaacccattgagacgacgcaaaaggcagcgatctcagcgtgaacgagaggtctcaacgtgaacatgaaagggttttttttttagatagggtaaaactaacaacaaaattcaacaatccaatttttattgttttgaaataaggataaaactgttttaaaaaaaagtaaaaaatcaattcgatcataattttaccagatacgttgtcgttttaaaattatatcttaaaatctaaaatcgaaatcttaaaccaatacttaaaaaattactgtaaatctcttaccataaattgaccatcccttatattatctcaaaatcagtgacataattgagaaaaatattattcatttaaattatgtgaatattatttattatacatattatttatcttatattcttaattatatttaaaaataaaacttaacaggactcatcaattttctttttgtaaaaaataaatttatcttatttaatattatattattatcttaatattattatttaaaattttttaatttaaaaaattgattgccaaactatttttatttacttttattataacaaaataaaatgtggataacttttattttaattatccccaaagcaatcaaagcatgcttcatttgtctccaaagtaatcaaaacatccatgttggaagagccaaggcgtaactcttggtaaaatcatagcaacgtggataaaataatattataaggttgagagaaaagacagaaacaaaggacatgagttggaatttttaactaacaaaagttaacaattaacaactaatatttttcaatcaataaaaggtaataagaaaattgaataaatattttagtaataaaaggtaataaaatattaaaaaaaaactaaaagctaaggttttaaaaatcactaaaatctacttaacaaaacatatgtttatcaaatagtcaaaaaaacttttcaattagtaaaaaaattaaaaataactaattgaaatgacatgctgaacataacctaagtctcacgaaaaatgtactaagactctaatagacatcatattccacaatacaaaaaatctaagagaaaccattgtaataaagagtctaaaaaaaatactatgaggaaccttgtgagtgcaatggctgacgacctaatttggtgcgacaacaaggttgcaatgaagaagacattagctggttcaagtttgaaggtaaggctgatttgtgtgatgatgacaaaaaatggtgattcaacgatgctggtggatgaaggttgcttcgacttcaacaactgacaatgtcatgagacaaaccaaggaatcacgaacctaaccgtgaaccatgaagacaatgtcatgcaaaaaggggaaaacacaaacataaaaaagaagacaaaccatatttgtacatgagaggttattgattttaaaaaagaatttttattatataatcctttaatcaaaacatccatgttgggagagccaaggcgtaactctttgtagaatcatagcaacatagataaaataatattataaggttgatttcctgtgaagagagaaaagagagaaacaaaggacatgagatggaattctttactaacaaaagttaaccattaacaattaatattgttcaatcagtaatcaagaaattgaataaatattttaggaataaaaaagtaataaaaaaaaaaactagaagctaacgttttaaaaatcgctagaatctacttaaaaaatatatgtttatcaaacagtcaaacaaatttttcaattaataaaaaaattaaaaactaattgaaatgacatgctgaacataacctaagtctcacaaaaaatgtactaagactctaataggcatcatattccataatacaaaaaatctaaaagaaaccattgtaataaagaatctcgaaaaaaaaatactatgaggaaccttgggagtgcaatggctgacaacctagtttggtgcgacaacaagattacaatgaagaagacgttggttggttcaagtttgaaggtgaggttgatttgtgtaatgatgacaaaaaatggtgattcaacgatgctggtggacgaaggttgcttcaacctcaacaactgacaatgtcgtgagacaaaccaagggagctcgaaccgaactgcaaatcagtgacaccaacaccgacgtactcgataacgtgaagacaatatcatgcaaaaaggggaaaacacaaacataaaaaagaagcgcaaaccatatttgtacatgagaggttattgattttaaaaatgaattttattatctaatcttataatttgatttttaaattgtttgagagagaaaatacataagtgcttgtgtccaatagtttgagccatgtttgtcgctacatgtgcaactatttgagccttgtacttttaactaagatcggactcaagcctaacaaaactaagcttggctcaacctatttctagacattagtttttttgttttgttttaaccctcgggttcatcaaggcaaatgatcctgactaatataaagtttaacttgagagataaataaagtctaataaataattatttcatcaataatcaaattcaagtagtacccgaataattcaaccttaacttcaacatattaactatttatatctaatcacgtggttggtcattaatttactttattagttttttttgtattacacaatacttttcgcaatttatttacaattaattacgaatgaaatcaaatgcttaaataatacacaaagttgtaataaatatacttattatttaaatgaaattttaaaactgttcttaattccaactttttaattaaaaacaaaaattacttatacgatatatttcacttttttatttattttttattttttaaatgtcagaggagatagtttataaaaaatatgatgcaaattagagttcaaaattttgaaataattatattaatttttatatatttaaaattgttttgtattaaatgattattttataaaaattattaattaaattatatgccttttaaaactgcttttcgttagattaaattttaattcaaaagtaattcttctctattcaatcgagagtgctaattttattttggataaacgctaaaggctcatacagatttagccaaattatcagcaagtcgatgaaatccagttaaaatgtgacatctatcaaccaattatatataaaatattatttgactttaacttttaaagttttattctttttctaactttatcctccttttattctctttcttcaaaacatgtaccgcaccaacggtgggacgcatgtggatgtttggcttggctagagataatgtgaaaaatgttagtgttgagttatggactttgtttatgatagagggagtcatggtctttcaaactttttgaaaatttacaaatacacattatataatatatacttaaagtgataaaaagtttttatttagtgtcatttttcatctattatattcttcaattattttattttaatatattaaattttaaaaattattttaattttttatgtttttgaaatatattatttttgtcttttttttcaattttttagaaaaattagtgttatgttaacttttaaattttttttaaaatcaaaataatatgttttgaaacataaaagattaaaataaaacttttaaatttaatgtatcaaagcaaaacaattgataaacatactgaaaaaaaaaaggtgaaattaagtcttttaaaataattaactttacttattaacgactaaaaatcgccattatctttcttttattttttaaaaaataaataactaaaaaaatcatcatctcctataaacagtgcaaagagggatcgacggtgagtttcattagaagatgattatgattgacctgactggtcaagcctcatccacaaccgggctttgtcagtcttcttcgccttcatcaacacattgttgccgatgacgatgatgagacaattgttgtccttaggtgaggcggcaattccaaccatgtagggaggttgcggtgaagacaaaagcgaggataaggcaacaatatttttgggtcagtgacgagaggtagaacgatagacggagaaaagagtcttatccattatgattgtgaataattggtgaatgatattattattgttattaaatgaataataataataataataataataataataataataataataataataataggagagtgaaggttgttgttgtatgtggtttcaaatccatcttttcttttttacttagtgatttttaatttcttaaataaaaaatatagtgacatttttagccgctattatgttaacttattattttaaaaattaaaacattgatgggcactaacgtttctaatgaaaatttgaaaaaaaaaatgatatattttgaaaacataaaaaacaataataaaacttttaaatataatatactaaagtgaaacaactgttaaacataataaactaaaaataacattaaaccattttaaaatttaaaagttaacataatactaacatttttaaccgaaaattaaaaaattgaccaaaataatacatttcaaaaacataaaagaccaaaaataaaacatttaaaatttaatgtaccaaataaaataactacaaaatataatggaaaaaattacattaattcaaaagtttgtaatgatataattttatactctacattatataacacatacatttataatgtatgactttcggttagttttggtcgccaaatgttttggtaattcggacttggaggctgctagggtatttcattgttttattcagtatatatgattttttaagagattcagtatatatgttgcagtggcttttatttggtatatataaaagataatttattaacaaaaagaataatagaaaagcttcttatacaatcacacaaacatattctctttcatctttaatttatattttgttaagcaactagatattgaaaaatgtattgacagtttaattaagaaaataaattgttttaaaaataatattttaaaattaaaatgaatttaagaccaactttccatcctacctcctttacgttcttgacgattcatctttgtctccgtagaatctttcattgacatcttttgatcatcttctccattacttagaaaggccatcagctataataggttatagtctctagcttcgtaacttagctcccttcatccacttattcactcctctcttgctcaactagaagacagggtctaaaggtacaagaggattatgaaatagaatacgcttgctttggcgattcctacgactacttatatatatgactattccgatttctatttctgtggtgcttgaaatatttaattcacatacattttaaatgctttaaattttaaaatcccttatacaaccactacataagttaatttctaatcatttacttcaatgttatttgtttatcatttgtgtttatattggaatttaaaatttagagatatattatgacattacatatttaatttaagtttaaccattaaaaatttggtttaattgtatttttatcctcaacttttaaattgttttttaaattttatttttaatttttgtacttattaatcaaaaaattattgagataaacttaacaagaaacaatgaaactttgaaattgaaggaggaagtttctcggttcaaaattcgtgaattttgagctgatttgctaatttaatgattattatagttggcagtttagatacccaccccaccgtattatatttttccatgtgataagatgttatttattatttatatcacttgtgaaagaaaaaaaacatagttgccaatttaacattcctccatgcaatatgttttccagaacaatatgtaattgaacataagtgtcttaactaaaaaataaaataaaataaaatttccagtacttgaatgcatagatgatgctgaatcttagttttagtggcaatggcttacaagagaaattcctcctactttggaggatctttgtaagactaacaataatacttgactttaggaaacagaattttgtgaaatttcatcattattaccaaagaaataaaattgaaccagtttgcccagcacatactgaatcattggatacaatgggcatactaatagaattgaattgaatcaataataacaatagaattgaattgaatcaataataaaaatataataaattgagatataaggttgatttggtgattaaaaaaaagagaatatagaagttgtagatttgaatttctcccactaacatgttaacaaaaactaataactaacatttgtcgataaaaagtaatataattggttttacaaaaaagaaaaaccaatccgccatcacatcattgacaagataaacaattttggtaacaataaccatgatcaaaatcagacacgcagacactacaaaaaaaaataggtatttccgatggtcaaaattcgtcgctaacatctaaaatccgtcaataacttaaaatttttgacagaaaatctatctataaaatggtcataggaaattttaaccgatggatttttgttgcccgtcgatagttttcgacgaaaatatccgacggtaagatatgtcaaaaattaccgatggaataggtatgtcggaaatcaccgacgaattttccatcggtaattttccacaatatatctggcggtaatttctgacaaaaattagtcagtaaatttcccgtagatatgtaacaccccgtatgcatccggtatattaacaattacttaatcagatttgcgcagcaactaatttaattaagaaccacagaagcgatttcgaaaaccatatttcttgattcattatgtatggtacgtaacttcaattaaatatacaaatacctatacactaaagtcagcctcattgatcccaaataacataaagaacgacagatacatcatcaggagaataaaccacatgtatatacatatacatcatctcaaccaccactctggcgatacaaaaaaataggcattcattgccatgatctcacaaatcacatcctcacacgagggcatacaaaacatgtagtgtctatacaacataaacataaacagagtccatcaaatgtgtacacacacatctttcctctacaggggtacaaaatacatcaaaacaaaaagagttgagccatgaagctctcatcacactgccaagcagctacacagaatctgtctctactggggcatccctccctgagacctatcatctttgccagatgaatcacctgcaaaatataatccccacacggggtgagatacaatctcaataagcttagggctcttggaggcttctcctccctcttggctcacttccatgatacacaacattaaaggcatcacaatcaattggccacctgaccctcacaacaatacatagccatcacctagctctaatgtatatctgtggtactacgcccgccacaagatgcatcatcatcagcatctaggactctcagtccccagtgtgagaccgaaacttacacccgtgccatctcatcgggagctaccccttttcacatggatacacgtatatggcacctccgagaataggcttcaactgcgacgggaccacctatctcttggtcttaagggatcatcatcaccctttacgtgagcaaaccaaactaggagttgcgctctactcctagagaggtccatatctatctaactggccagaagatctattcaactgataaccatacacacaaagcataaaatcatgcatatatattatcatgaggaaactgtaacaaccaattcaatgcacatgcatcatgtatgcaaccattactccctcagagtatgatggaacacaggcaatggaaaacactccccaagagcaaagagcttacctggcaatgcagtgctctgctatccaatcccagcactgtgatctacgccactgacaccctcggtgtcacgccctatacaaaggcacacaagcaaaatcaataaacaacctaaccttacaaggcattaagtacataataacagttcttaatcgttaaaaaggaaagaaacattattcctttccatttaaacctcttagtcttctatcttaaggttatcagaactaaccacctaatagacaactcacagaccctcagtaggatctatctcggcctaaccaagtcactagagtctcccaaagattcttcatcaaccaattcagagaattcaacactatacaggcccaaaactcaaggattaacaatatggctaaaacagttacttcaacacatcaccgtttatatagcttctagggcacatattgtacaagcatcaaggctcatgcatgtcctacaatcaccaatttaaccaacattttcctacacatgcatttctcatagccaaaatccaaagtccataaaatcaatatttcaaagctaattcttcgtcacaacaaactcctaaacatacttttctaaaggacccatgtctaattacagctctaactcaaaatggtcactattcacctcaagaacaatttcacaaatcaaatggtaaaacttgagtttcttacctctaaacagtcaagaaatgttagaggatcacttctccaagtgtgggagttcgcaaatcgcctcctttccccgccaaactcaagttttgtgaagttccctagagaatgcgatctctccgtttgatggtttttagggaaaagtgatgaaggattctagctcatatgatgattccctacaagtttcatggtggttggaaggtgtttagatgaagatatggagcttcccgattgctctaatggcagaaaaggtccagaggaagaagaaggaagggttttggcccccaaaatcgcgtaaataaccttttatagtggccctgtcagagttcccgcgctgatcgccccaaactcgcgctaacggcgccacatcccaaaggaaattggcttcctagagcacttctggcgctactggcaccaattcccagtacatctggcgctaacagcgccaatcccacgctaacagcaccagattccagccgtcgctaattccgtcgctaacactttttgcgacagaatattgtaaatttaaagttctctttctttctttttcttttatttatttagccttggttattataagatatatatgttgaaaattaccaacagaaaaatctctttaaatacaatcaattttcattcacacattagctaattcaactactagcaattaataaccaagagttagtatccattcatccattattcacataacaaaaacatagttgcacatcacaaaaaattaagtcatcatatttactaccacagtcatatcaattaattatgaacacaacttatctaggattcataaattactcaatgcatgtaattctaacaaaccaattatgagaatgccttattcctgcacaaaatattcattattcacatggcaccaataaacatatacacttatagtcactgaacccacatagcttataatttacttggaaacaagtacttcaattatacgttcatgcacaaatatttatggggaatgctagttatgtacaacaaatttattcaccatttttttacacaaaaggggtgaactcgcatttacttagtttaaaatctgaaaggaaagactcattcaaaccttgacagtagtgtttcattaaacttactttcaaaccaaccctttttcaaacaccaaatcacatccacactgctactaattattgcaaaaaaagccttatagtaacatagatagagagaaataaaataattagtatatataacaggcattgacattacgggctaattaactagcaaaagctacactcaacagtcactgcctgcaactacagtgtgttttgtgtatattgcatatatcaacaattgaaggaacctgagactcagctctctgatgatgcacacaaagagtgacacgctaagacagtggttaattattatgaattggttctttttcttatcaactaaatgcaaaaaaaaaaaatgaaaggtagtctgagagcattgaagtccctcgatttcaatcaacaacagttcaaaaatccattgcagatcccacatatatatcgagggaaacggtaatcttatcggtgacctcttgagaaaaatgttatgtaaagacaaaaaactcctagttcatcaaatttgatcaatactcaacttcaattaaattcgtttaaaaacatataattttgaatgagctaaatttctagaacacatgttgaaataatgaattttcaacacaatttcttgatgcatgggtgacgtacatctgacacatgaagtgtaatggtaagcaatagaagcatccaaagcttgtttaatccaaggatgacgtatgttattgacaacactattaatgagcgaggaatctaaataattattttaatatatatatattaattaaaaacaaacacgatcatattgaataacatgtatttcatattaattaaaagtccaatggagatctaaatctgttctaacctgatcatattcaaaatttcaaatgataagaaacctgtgaaatagaaattcatattttgatggaagaaataataacattcaaacatatgcttgtgtgatcaaacatatgtaaccaaaaacttgcatggaaatatttgggaagtgtctttgatttggaatcacctatcttgtagtgccactttggatgaaggacaaccctgaattgtaaccatcaatgtacaaccttgttaatgtccaacgataacaattggtgcagaaaagaaaactagacagtctaacacaaatttagagatacattgagaagaacaaaataaaacaataaataatttttaaatcatacatgaaagtgaaacccctactaagctatagacagaaatatcaataacctatatgtattctcatctaaaaggcttaaataatatcaagaataattccaaatcaagtgagaagcacataccagcatgtcaagtgaaaagcacataccaacattatccaattaccgacaaaaactctttccagaatgatacaacaaatatcaaatgcaaaaaataagaaaataattccattctaccaagaaggtttgtacggattagctatgttaagaaaatgacaaggtaacataagtaggtgtgcataaacaaacctcgcccacactatactcccagtattatttttctttaattacagcagataaatcagttagagattctaagtaaagagaattgacttctgaaatagaaattcattttttggggcacaccaatggtaagtaatgttgctgataaaaaaaagcaagtaatgcaatatttgaatgctaacttactgaaatagcaagtaaacattttaatactaatagaaggcatgacataaaataacttgactactaagttcatttgggctcacaattaccttcaggaaaatgcttcatatatatatgttattgcaatagaatgagtgtataagacatataatttaactaatcaattaaagacactcaaaagttttggaaagcaacaaggaacattaaacaaaagaataatagagagaagactaagtcaagagacttatataatagagaattaatttggttttagcttgtgtggttaaccataaagcctatgtatgtagttctagtgtgggctttgatgaaaataaaaggaaacaaaactacctgcacatggtttaaatgatttagaaaaagcctatgatagggttccatgagaaactttgtgccttgtggaaaatttataattagttaaccgtataaaagttatttattctattagtgtataaaagttcaagtcttaacttatgcaaaactactaaactagcacgatgcatgcaaccatattatgttttaatcaaattcaaactttttttataaaattttcaagctcgtatatgtgtgtgtatatatatatatatatatatatatatatatatataagtactacttaacattttgtcaaaaaaaactaattaatattatttcataaaaaaacattttcctcttatatatgattgtgtgttaatacttgacattacaattccctttaaaaataaacttaaacaaactaatcttttttaacttaatggaagtttttattttgaaaaactaattcaattatatatatatatatattaaaaaatagtacaaaaataggatgaaggtgccaggggaaccattcccacaaaggcatatgagtaatatgcccgagagaaacaggaacatgtccatcctcttcctttcattattggtgaaagtgaaatttgtcatgtaaaaagaagataggttagataaagtttacaatagaaaatcttgctgctaaaatgcaaaattttaatttcacatcccaaaataattaactcaccaaaatttacagtgattaacctggtcaatgcagttaccaacccaaattctgaggtaatggctcaaatcaagattatggcaagtgtctgctttaattgtaacaagtatacttatataataattattaacgagtcagagttctcaatcacacatgataataaatataagaaacaaagaaacaaaagaaattgagcgagcaaaatgtacacatcatctgttcatacctatcatgttggaattcacaattatttctcccttataagaatagggcttaaaacttgtctccacttttccatcatcacaattgatggatggcttgggataaaatctgcaccaagaaaatataaaatgaaatctctgttagatttaactacttatatcatactctataatatattaagtatatatggtaggaaaataaatttattatcccaataaggactattggagctttccctgttggatatgcctgccaatggcacacaaatccatgcaagcactaattttccaaaaataaaacgaaaagtaaaggaaggaagccacagaagtatctagtgacttttctttcttcattcggaagtcagaagaaaacaagaaacatacaactaagggggcatccttttttctgcaaataattagattacttgatctataagcccaaagaaagctgcaatcagatatagttaccaacctgagaaccactacatactaaactatcatttggagcaaaatgcttaagaaattggcatatttaaaagactagaaatttgtgactaactataatcatcaacaaaagggataaatggattttgaattgtcgataaaataaaaattaggaatgagtatagtatacccttagacaaatatgaaaataaatcttctacaatacacgtactaccccaaggtaaaaggagcaaaacaaaaaacataggcaatcagtttatcccacggtccaaagattggcatgaaatcataaaaaagaacatcaaacctttaatgggtagcccaagcatactgcagcagaaacattgatgtctttcatgctagccaccatgcaaccaactctacaacaaaataaacacaagatacatcatgtcataaatatcttgatactataaactgaaataagacttcccagtccaacataaatatgtcctgttagaatatccagaatatattatagaatatttcttatgattagtttccttaatttttctagtttctatattccctgatatatcatgatttgtattatttttagtcaggattgattacaacaaataagactagtgggcagaaaaatcaatataatattttttaataaaaaattacgaatttgaagttgtttggaaatatattacaaatctggggtagggagacacgctcaaattgggcgtgttacccccttgagtcacgcctaaattgggcgtgactaactccgtcgctaattcgctcgctaatagtttttgcaacggaatattatggttttttatttttttatatttgcgaccacagtattctgtcgcaaaaactgttagcaactgaaataaaaaccaaaattagtgtattttaatttttgacgtaaaatatcatttaatatcatttattgttattttatctaatttgaaagtatttttagaccgatcttcatcatagatatgatcttttttactttttttaatattattttttagtatatttttttaattttatatgattttatttaatatatttggatttttggtatatataatttttaatatatttttatttaatataatttctaaatttttatacgattttgtttaatattttttggatttttatataactaatttttaatataatattttattcaataaaaattttcaattttattttggaatttgaaaaaattgaaatttttattttttaaaattgtaaataattttttaatatagaaagcattttaaataaaatattatattttgatacttctcattttttatatcgagattacccctattaaacacattatcctcatccctctcataatctctttcatcttctcataatttgataattctctttcaaaaaagtagaagacaatccccttttctctttttgttccagtcaaaagcatgtagtcgactaattagtcatcgaagctacaccgaaactcagactttttgtcaatcggtgactcaattgtataaaattagtgtggtcaaaacatatacatccaaacgaaacatatacatccaaacgagaaagggaattagaaatgatcgtccatatttcatggtgaatgatcaatcgtccgagtaagttggattctgtgatttctttcttcatcatcatcaccatctttatctctctgggtaagcacaatgcaattctttgcatttcaatttgattcactttgtctcacgcagttccactcctatttctagagttttgcaatgtttcaccgctccaagtgcactttggaattaatggggtgctacaattccaattattgtatggtgagtgcactttgggatgagtgaaacgagtggtaaagtatggaataagtgcagaaagttaggaatgaatgtgctttgggataaatggggttattatataaaagatccaaaaaatattaaacaaaaccatataaaaatttagaatatcgaaaaaagttacaatgacgtacagtatgtccttcaaatggtctaacttttgatagaaatgtctgattgaggtgtacgatatgtcgaaatgctcgaaattaaagaagtaattaaaaaataaataatgcattaaattaactgattaaataattaaaaagtagaaaacaaggaaatttttggatgattgaagattaaatcctattttgatgcacttagagacattttttggaaaaaatagttgaccaaatctcctttggacatttacttaaggcttttctctcaattccgagcgttttgacacaaactacgcctcaatcggacattcctatcaaaagttatgatcgttcaaagtttatatacacatcgcttcactaatgcgtgacacgtgttgtcacaggtgaaacacgctcaatttaggcatgacccagggggtaacgcgccaatttgggagtgactcctgcccagatttgtaatatgtttccaaacaacccaaattcgtattttttattaaaaaagtattatattgatttttctgccaaggctagtgctttagattttatgaacaacaccatcacactgtagcacattacaatactcaagtacatattatccaaagtctctattatcaccttgcctccctcaattcataaaccataattccaacatatccaaatttggaaaaaaaaaaagaggaatgcctacttgaacccattgatttgcctgcaagtatagggatgacaagggtacttagttgagtttccttgacaaaatttgagtgaaactccaccagtttttccgccttgggaggagccttctttttcgcagacatgtctagtgaatgacaaacccattaaattcacttcgagttaacacaatacaattatctcgaggttcaaacaactagagatcatgcactttttaaaaaataaaatgaaaatgaaaaatggaatacaatggatatagttagaaacaaactcaaaaggatagtcaaaagtgacaacatcaacagcgtacagtgcctcctttaacatgttcttccatctatcaaaaaaatagagacaataaagcctataacaagatttaacgcattatctcgaggtttaaaataaaatccatgaattgtaaggatgatacctttgcatccaattagaagaggaagaagcacggcaccatgagcgaagatcacaaccgatgacaacgttgaactttagtctcgctgtctttgctctcacgacgccgttttgcaggtggtaacgaatccttgccttcggcatagagaaatcccccaatcaaaaccctatcccgctaaatttcactgcacacactattaaattctaatttcgagccaaatgacagacaagagaatgcagtgttcaccttctcgttttggaatttggatttttttttaaattataaaatcaatttaaaattaactatattaagaatgtactttaaaacatattaaaatggccgatcaattgaaatcagattgaatgatatttattataattttttatcatatatttttttaaaaaatttaaaattaagacggagttagggtgagaaaggcaaacatgtttctcaccatggatattttaaaaaaaaactgttgatttttttagttatcatgatgactcaaatgtttttttttttcctttactttaagcacttttttgaagagtttacatttattttttaaaaaaaaaaaaaaaaaaaaaaaaaaaaaaaaaaaaaattcctttactttaagcacaatatttttatgaatgattcatgctaatgatcattagtttagaaatcatttttttctaaaagtactttagagcttacatcaatatgcctaaatgtattggtgaatactgttgtttatcttttcattaattaaattcaaaaacacaccttcattggatttttttataaaatatcgtgctaaatgtatttgtacaaaacaacactgtaactaatttaaaattcacgtgtctgaaaaaaagcactataataaagttgaaaattgttattccatttattcattgatacacacaatacaaattattaaatatatgatattaaatatttaaattacatataaaatgaatattgaataatttttattttttatatcaaatacttttttctgtcattattttttttatttcttgaagaagggttttgttttcttttcttttcttaatagatatatgaatttttttatatgatattttatataaaatgtaatttaaattttttgtcattaatgatctattttctttaaaaatatatatttttatattgttgattaatgactattttttattcgcattcaattgtatctctcatttagtaacaacttctgcttaattttttaagttctgattctttactttaacttataagcaacttttaagtccaaaaaaaggtagcccaaacaaaacttaatcgaaaattataatttaattattttattatatttttcctaacttaattataactcaattatctttattaattttcttaaattattttataactttatcaatataatatttaataattatttttattcaagataagtaaaagaggaccttaaaaggaaatatatgaaattaaaaaaaaaaacttaaccttaactcttttacatattcaagtgcttacatatttatatatgtcagtacatgacttattcttataatataattaatttatgttttaaaaaatatatttaatcttaaattaatttgtataaaatgaaaaattattaatttatcaacgtgtgcatcacacgataacacactaataagttttaattaattattacgctttgattagtatatatgtcacactaaagtcatattgaaccttattgaattttaatcaatcattagtgtatatgttattctaaagtgccttaattgatttcaatcaatcattatatatcacatactttttctaatatttttactttttgacacatgatgggaaaaaaacttttatttacttgttagtcattcacttacctaattatggattcatctctagtgtgaaagaattcatttaaattgattttatgaaaaaaatggaattagtttaaaataattaatttagaaaatcattttacgtacattttaaataaattttattattttatagaaaatattaaaagtatcaataaaagtggaaagcatgtccgatcgaataaattttattatgaattcaaaataaagggtgtgatataactcaaccatttctgacagaatatatttcgtcgaaaaaatctgtcgctaacttaaacagttccaacaaattattttctgtgggaaatgttttgtcgaaaataccattttttgtagtgagacaataccaactaccaagcacttcaaaggtgtcgaagatcgtagtctcatcgaactgttggaatcgaagttctttcacttcaaaaacttctcatacacatagtcactagagtggtgacaatgtgtgaatggttgtaaggttgttaacatagttatttttcgtttgtcgaaaaaatggtctttgataaagtattgaagattagtcttttaatagattattttgactaagtgtcaaaatatagtattttgactaagtgtcaaaatatagtattttgactaactgtacgatggtagaagaaatgaagatttgaaaagcatcaagaaataaaaaaatcaatagtgaaaattgaagatataagtcatcaagggtgaaaattgaagacaaaagtcatcgacaataaagatgatgactgcaagttactggaaattatttggtaagttataggtatgtaggaactattgtctataaatactaattcgtatcatggtaatataatatgattcaacaatgatccaatgacttcaaatatcttttgcaatagatgaaagactcaatgaccaaagtaagactgaaaaagaactaagaagccttttcaaagtttaatcatgcaagtgtacaaaccaagaattgtctcatttgtataacttgaagataaattaaaagacaataatttgaagagcacaaagagtccaaaagtttatactcaatatgcaactatggactaaagtttatttggatagattatataacttttggtctaaagaattaattaaggccattttctaattttcttaaattttcgtattttattttcatgtaataagttcagatggttgttgacatcttttaagtcagttttatgattttaggcttcccgagttattataatggttaacgggttttattgctagttgatgtttaacattggtggaaatttaattctaagtgagaattaattcctagtgggatgtttagaaggaagcctagcttataaatagtagaagctttgtagcttttagtagatttgaatttgaatgaaagtttgagttttctcccttttgtgagagctttccttggttcttgggtaaataactaaatttgatattatcaaggcaacttgtgatcaaatgtatgcttatcactcatcttctcacctatttcttgagtgtggtgtcaatatccttcattaaaagaaagctaagtcaatttctaagtctgaaaacttcaaggcaattcgtcccattttcatgtttatagcataataaggttggaacatgtaatacctcatatcctcttaagtccacatgacgctcataagtccactcaacatttacgattgcgggttagacaatgttttcaaccaccatttcaattccaatattttacttttttcatcaactaactttatttattttcacttatatttattgcacatcttattctcatcctttctcattttatattacttttatttccacaacatcttctcttacttaatacatatccatagtttgttgattgtacttgcaaccatatattttaaatcaactaaacataaaatttaacacatagacccatgacaaagggcctaccaagaggataaaagacctccaaaagaataattgtctctttcctcgaatatactatgagattatgtttgctaatgaaaacaagcgcaattttcaccgttaacaacaataagggtaaaatttggaaagaacaaaaattaaaatgttagtttcttaccattacctttgttatgtaaaatctgtctaagttatgaaatttatataatttcgatgaacttgtctcaaaagaaaatgaagaatgcattaaagaattatcaatatttggagtaaaattgaggaattgtattcgtcatcaaaagaattcattgtcaaaattgctgttgttgataactctattaaagcatgcgcgacagttaaaagtgctaagaaacaagattgtttcgaaactcgaattatcaattgaagcagtcatagaagaagttacatggagtcatcaaatgaacattagatctgtgcatttagaaatattgttgtatacgtgtgtcataaaattctaagtatttgaaatttataaataagacctctgactatcagtttttggtagattgaattattatcacttaggcatggcaacggggcggggcggggacgggtattgcattcccgtcccgccccgtcccgttccccgccgggttttaaaacccatccccatccccgtccccgcttggggtcgggtttttcccgcctcgtcccaccccgctatttgattaaaatttaaaaaataaaaaaattaatttaacttttttattgaaaaatcggatgaaaaagttaattatgtaacaaaaaataataataacaaacccacatttaaaatatgggatcataattttaaaattacaaaacaaaatcaatcaattcaattaaaaaaattagaaaataatatatatttttatttttttattttttaatattattattacggggcggggggcgggggcgggtatcagtaaccccatacccgccccgcccccgctgttggctatcggggaaaacccgaacccgaacccaaacccgaacccgaaaaattcggtttttccccattaaaatcgggacggattcgggcgggtacccacaggttcggatcccgctgccatgcctattatcacttaacttcttaaacaccgacaacgttgtacatcaaagttagctactggttcataaggtcatcgtgtatgtatttattctcacttttaatgaattcgtgcttctttattttactacatctttttaaccttttacttatttcaatctttattttatctcaaattcttaactatttaaatctctactcctgtttactatcaaaattactattgaaatctaacaattatgaaaattaccttttaaatcaaaaatactattataaaatctatttacaatctgtcttataaaccattatatgacattattgtagttatttatcgatattttttttatcaaaaatcattatcattatatgtattaaatattagacaatcctctaataagttgaaatgaaattgtttctttgatgaaaaagaacttccactcgagaatacattctatgtcttatatttaaatatttatttaataaaatcatttagtgaaaattactcctttacaataataaactatcttcgaaaaataaattatgaatttcattcacttacaaagttttttgaatttgatggaagaatcaaaattacaaatataaaactaaagaactaaatacttttattttaaaatagatgaattgaaattgcagaattttataaataaaaacactaaatatctctattttataaaaaaaaattaaaattatatatttaaaaaataagagatcaaaatttaagccaaaatttaatagacaagtgtcaaattttcaatggttagaaggattattcgggatcttccattcggaggctctagcatctctcatcgatctcgctctcaaagttctctctgcctccttcgctggggttttgttttgtttcgattctcgttctttagggttttctcatcccttttcaatccccaattacccttttctttgatcattcagtgttttcttctctttcacttctaatttcgatttcatcgttaggtttttccttggaaccctcaatctcgcaaaaccagcggttcaattcagcttccctacaatctagggtttcgtttcgaaaatgcctccgaagacggcgaagcgagggtccgcgtcgagcgcctcgaagaggggtggcagaggtggcaggggaaccccgaaggctgcacagaaccaacagcaacatgaacctgcggaggagaccgtgaaggttgaagagaaacaacaacccgtagttgttgttgttgctgaggaggaacaacagaaggtggtggtggaagaagagaatcctgctgttgaagagaaacagcttgtggttgaagagaacgaatctgctgtggttgttgaggataaggctattgacatgaatcaaatggctccggaggctgtggaagaagcgtcccatgcggctaatgggttgagcgtggcgaaaagtaagtttcttttctttactcttaagtgattaagataagatttttagggtttcttttagttaggatgggggcagggggttgtgaagtttagggttttgattgtgtttccgagttgagattaatttggttgtaatgaaggttttaaattgcaattatggttatggtttcataactttcattgtgatccttgatattgcgggaaattggaacaaatgcggccagtgcggtcacttgcggttgcagtttcgccacgatcattgggaaattgggacaaatgcagctgatgcggttgctattttgccccagtccttgatattgggacaaatgcagccaccaaaaattgggataatgtggctgcatcgccgcttctggttgcagttttgtctcaatccttgatattgggggaaattggggcaaatgtgtggccaccccaaaaaccttgtagttgtcgccaaaatcatggtggctaaccttttattaaaacctcggtcataattatttttgggttcttatcttgtgaaatttacattgttttagttcccttaggatatattaatctgattttttaatttttttttgaaatgttagtgaatatatgatgtttgatagatctggtctctcctctttgtgtttgctattatgttttggtttgaaggaaatgtactagctaatagcaggaaagctattgcacgatgtatttctccatgaatgtttaaatgataatagttgttcctttgcctctctgctagatgttggaattgagttggggggctattgattggcatgcaacccattcctgttctttagatgataaactttgcatatatttttcggttttttggttaaagttctatttcagttcatttgtgtgttagtgtgctgtcatgagaatagtttcaactaggaatggtgagattgattatggggtgtggagtaccctaatttaatgaacactatgatgctggaaaagtttggtctgttttgacggggatcatttggtatctttatttttgacagacgatgaagaggaggttaaggagtccatagatgaatatgagaaagatgaacgcttagatttggaggataatgatcctgagtatgaacctgaggagtatggtggagttgattatgatgagaaggaaattgaacaagatgagggtcatgaggtaggaaatgaagtagaggaagaagaggctgaagataatgtaggtgaagaagagggtgatacaggtgaggaagaagtcgaagatgttcatgacgaacttgagggtgaagaggagcatgagcatgctggtgagagcatgagcatccagactttgctgacgttgaggaagaggaacaccgagaagttgtgaaggagaggcaaaagcggaaagaatttgaagtttttgttgggggcttggacaaggatgccactgagagtgatctgaggaaggcttttggtgaagttggggtggttacagaggtcaggttgatgatgaaccctcagactaaaaagaacaagggatttgcattcttgcgttttgaaactgtggagcaagcaaaacgagctgtagcagagctaaaaaatccagtggtaattttttttatcttctcaatgttagaatagacttaaaactaaagccgaattaaattacatgtttttcatcaccccaatttcagattaatggcaaacaatgtggtgtgactcctagtcaggacagtgataccctctatttgggaaacatatgcaagacatggacaaaggaagctgtaagttaatgtttctgggtctaatttttgcaccttctgacctcaaacaccttggttgtgtttgatagtttttttttttctacattcaagtctgctgagttttgattatgaatgaaaattctggtgcagttaaaagagaagttgaagcattatggagtcaccaatgttgaggatttaactttggtagaagatactaatgatgaaggaaagaaccgtggatttgcatttttggaatttccttctcgttctgaagcaatggatgcctttaagcgactgcagaggagggatgttgtatttggagttgataagcctgcaaaagtttcttttgcagatcctttattgatccgggtgatgaaattatggcacaggtattttctaaatccaattccttggtttaacgagggatttttaaatggaacccacatacatggttctctggccttctgctgaagcttgggttgctgtaaacattgctgctgggttccaacaccaacagtggttaatttttggttgtctatattttggatattgtatgactttgttttaaattgtagtcacattggctgggagcattttcccacaattttctgcagttttgttggtaatcacaaattcacaatgtgcttggtaacctcagtttaaaactaaactcatcatttatattaaagaaaccacttatggttgatcattaaattactatattctgcaatttttattgaatttacttttaagggtagtcagacacttcagtagtgaccagctatccttgtagcgtggtctttggtgtttagatactattgactctaatttactgataaagtgtgtttaagttgcaggttaaaactgtgtttattgatgcattgcctccttcatgggatgaagattatgtccgggatcttctcaagaaatatggtgagattgaaaagattgagcttgccaggaacatgcctgctgctcgtaggaaggactacgggtttgttacatttggctcacatgatgctgctgtaaaatgtgctgatagtattacaggcacagagttgggtgagggagacaagaaggtctgtcttggatttaataaactgtatatgaccaacagttaaatggggcatttttataatgcttttgcttctttcaggcaaaagttagagcaaggttgtctaggccactccagagaggccgcggaaaacatattagtcgtggggatatcgttctagtcggggatctggaatgatgacgcggccttcatggagccgacctgcacctcgttctttccttctcgtagtgtaagaggagttggaagtcgtgctccacctgtgagccggttagtgtgagagatagacgccctatgttttccataccagcaagaagtaggccagtgcctcctccatctagatcttatgataggagaccagttggtatgtggtatacaattattttaccaaatagactggttggttgttactattgttcattctttttttataacattataaactattgtattatcttgttagctcctgcatatccaaaaagtagcatgaagagagattatggtcggcgtgaggatatacctcctccaagaagtagagttgctgtagattatggctcaagggttgcttctgaaagacgaacatcttacagggattatcctgcccgtggtcctggctacgctgagctccctagaagcacatctcgtgctgcaccaaggagaggctatgtggatgatgggtatggccaaagatttgagagggctcctcctccacccctcctccccatctaagttaccgtgaaggacgtccccgagattatgatgctctgtctggctcaaaacgttcttatgctgctatagttagtatttttctttgtatttattataattgctctgtttttttaaacttgattttgttctctaattatgaatgaaattatttgcttttcatttttaatcaggatgatgttcctccacgatatgctgatactggtgctcgccaatcaagagctcgactagactatgactatggtggtagtgcttcacagtatggagatgcttatggtgataggttagttttgtctaatatttaaggttttatgcattttttcttccctaagccaattattgtgatgcaaataattccatgcttttgattggtagacttggaagatctagtatgggatatggtggtggcagcagaagttctatttccagtcaagattcacatgggttgtatagcagtcgacagggcatgagttatggaggaggtggatttttgctaatagtctgatttattgttgtcggcatcgaatctttgtttcttacttttgacgtgttccatgtcaggttcttttggtagtggtgatgttggtggcatgtattcatcaagttatggtggtgattacatttctcgtggaagtgatgtaatgatcctggtctttcttagtcgctataggaagtagtgttatacatgcatatattttgggtttattcttatttattgtttttcctgtgctgtaggttggtggcagctcatattcatcaatgtattctggaaggggtgtgggtggtggtagcagttatatgggtggtggcggatcaggatcttattattgaggtaagtcatctgataacttcttgggattgcattttgtggagtacatcaggatgcatccaatataagtttatatttttctgagagatatctctatcctcgaaatagcatctcttatttttttcacaagtgccggcgaaggttgcactctggtcaccagtgcatttgtctgtgaacagatctgatatgataaagtggctgctgtaggatgactgttgaagcatgatgtctacaatttggagacaaaggaatatttatagctttttttttggaattgtcacaaaatctagcttatctcaattagagatgagatgtattcatcaagttatggtggtgattacatttctggatcggatgtattatcagtacttgaatttatgctgtatggactcaagttaattagagacggaaaaagtattgagcagtgatgtgtaattaatatcatacttggacggattatgtgaaagatttcccactgctctatcttccttttcatttggacagagatcaggctagagatgctacttgtttgattaaggcttcttggatttttacctcctgaatttatcaataagttggttctttattttgaatctctaagagatgtttagttactttggatggattacttgttttttacagtgatatgatcagaacagaagtgaactaattagccctttgttgagatagtagtaataagagcactacttcagcaattaataaagtcaaatggttagtttcttgggatttatttgacttggtgtcttcctaagatggtaaaaagcataatgcactggtaatatttgttgctggaatgatttgatgcttttaaggtttttgtgctgagggggactacaagacaatgctaaagatgcattgatatctttccttagctagttaacttcttagatttccatgttccaattcaatcaatcatttgtacacaattggttgacctccactgacatggaccttagaagatcaattgcctttgcaatatcttgggaaaatgcaacaatcaagtgattaacagattagcagaaaagggttgagtatagtctgttactgagtttctcaattggaatttaattattaaagttggttctttatgtgcctggttttaccacctccctgcttaatatagccaatccctaacccaaaggcaaaggttgccgaagtttatgcttgtgtggatttgatattgatttcatgtttaagtgggtgtctcctattaccatacaatgtatattgagtttcaaatacatatactattttcatttggctctcaaggcactggaagctattgcctatggaatggggtatcaagtatgtcttgttggtgggctcgtttaagactacaaagcttttaggattttgctaaattagatgcttttacatatctaattttctcatgcatataactcagatttcagattattgttgcattaatattctcaggttcttaggtttttcaaattgttaatcttacaagtaattaggtgccaacctgtgtttcgattctcatttaattatccttcactcggtgagggttatgtactaacttaagttttagtttccagtttgttctctctctcggtgcagggtctaaactctaacttaagttttagtttccagtttgttctctctctgggtgccagggtctaaactctcatcaatcctttgttttgtaactccctgtatatacaatatggaagtttaccctatatttctggtatcttgttttatttattttgatgctgtcacaggtttttgtaagtcaatgttttgtggattggttcatgcatgacattgtaaatactggggaaagtaacatgttggttcagattcctatttattcctcctatgttgtgcatgtatgctgataacgtattgtataactacagaaaacaaggcttttggaacgttaaaatattcttagcaatactagcttttagtttttgacatggtgagctaggtgtcaaatggtaaaatgtaggaaaattgggtgattagatttggttgacccctaccattgactttgggtgattaatctcaatattacattaatgcgcaaaacaggaactaatggtaaatattcgtgcctaacgtttttcatatcattcacctaacggagatggtcaatgcgtgactatagaggtgaaacatgcaaacataaatgcgaacatacctacctgactcgttgaactaaatcaggctacaaccgtaatgagataccggtgtttaatcgattcattatataattataatttaattaaatttagtcacatcattagaaatccccaagaatgaaagataatatacttgcatcccttgttgtataatgcaatgcacaataatggtgatgtatacaaaaggagtaccatatgtattaataacatcaagtagggtcgtgacgtcaactatctttaacttgttggtatcactacaagaagtgtcatagatggtcaaaataaacaaagtaataaaagaatggatatgacaaatcttgaagattaatatatagcaagtagcaatatagtgaggtctttcacactacaaaaaggcatatcgtctcatagccaagccaatcgcgtttaagaaaataaaagaataatttgcatttaaaggggaataaggacttttccaaaggttaaggactaaagtttttccataatttcttaactttgtaacccatctctctacctcttgttttccaaattcacaagcttagagggaaagattaatgaaagaaggttacgtggtgaaggtgattagggtgaagaagataaatagcgtaaacaaagatagctatcttagctagaataagttgggggatcgcacttcaatgcttgaataatcaataagagttgtttaaagtgaaacaaaaccgagaagagaaagagagagtaacgatggtaagagaaagaaatagtaggatatagtataagcatgaaagatattaggaaaaaaaagagaaaagaattaaaatgagtgagaggctcaactacacaaagataaaaatggataaaaaattctcttaaaagtgttgggtgtaatatgtggttaatattctgcaagtacaaaaatgaagtcaaacataataagtgatgatgtttcctaatgtgaaattgtcgtgcaacttctcaaatacaaaataagtaatttttttttaagaatatatctttagagaaatgctagtaacactttatgtgatacacttttttgaacacttcctttttgattggttgaattttttgaaaatcacacaaaattatggattccatattttgtttaatagtctctcataattttataattttcaataaatttcaattaataacaaaatgtattaaagaatgtgttgttaacaattctcatatctctatgatttggaaacaaatgtttcgtggctgttccctaaggagaaggaagtaaatcttatttagcttacaaaatttacagttagtcaatgaagatccaagttggtaatatctaatcaaagagaagtaactaaaatttgatttaactttcacactttatatcaagtcaatgtggatccaagttggtgttatctaataaagaactaacacatttatatttatgataaaaaaaaaagcgcgtatacatataaagctaaacatcactttaagagagaaaaaaaaaagtacattcaaattgatactagtacttaaaaaagaacaaaaaaaaaattatatcgtaaaatattctatttaaagtattaagtataataaaaatatacaaactaacatctattttttatattaaatattactaaggaaaaatgaggaaattacacttcgacaagttcatttcaattttcaaagatgttattctagctaggtatgtttatgatgtgaatttgcaatctaagagacaactagcctccatcttctacaaacttagtcattttttatccagcttaactccagagttattttcaaaacaataaaattgctctatctaatggcaaccacgagaccaacttcttatcaataattatctttaagtagtttgtgtaaaatatggtggcgacctttcgattcatattaaatttactttgttttatataataataaaaggatcaaaagataaaatttcgaaatgccaaccagttagtattttatttttaattttcttttcagaaatccacacaaatattggtacaattttttcaaaaaatattcatgaaaatgtcattcaatctgagacttgtttgggtaagcttctctaaaagtaattctaaaagaagaaaataaaaagaaaaaaaatgagataaattttttcaaaaataaaaaaaaagctcttcattaactaatttttagaaactcaccaatatagtttttctaaaagatgagatgtcatttacaaattagttaatgaaaaatttattttaacttatggagaaactcatttcatttttttcttattttctttttctagaagtgtttctagataaatttacacccaatcatacctttgaattattgcttttaatatattttaatgattttgggggggaggggggttggagggagacacgttttaagttttaaataaaattatgctaccacacattattttgcattaattcaaattaatattttcctttattttcgtaaacaattaaacataaattacttttaaatcgttcattacattattcttacgtatgatgcaattattttctagaattttttttcgttcatgtaactcacgggtttttatctagtttgttatgaaatttgaatatgaaatgtatttttttatcctcactgtacgtgttgaagaaaacagaaaaaaaattgtcttgtaactgacttaggctaattttgctgcaaacttttcatactaaactaaacaagattttcttatggagaagaaatgctgtgtcaagtattaacagtttgttatagaatttgacgaattcaaaacttaccgacgaaatgttgcataaccatgcatgagagagaagggaaagataattgatattggctgatttaaaaaaaagtaattgatattgtaattgtcttccctcaaattttgtaataatttgtataacaattttcttcagagaaatgttatttagtactaatcctttgtcacgttgatcaattagaaattgatgcatgaggttcttgcataaacatatacgagagagtcgataaagaaaacattgtattgtaattgacttttgacaattttcgttaaaagaagataattctaaatatgatttctgtataagagaggagtttgtgattgtatattatattgcatcaatctaaacttagttcgtggcttatattacattagtattcatgttatacacacaatcgattatttagtgatggttggacattaatttagggaactcctaccacatgacaaattgggattgattcccaactttcttgtcaatttatgtcggtggtgttgtaatgagaaataggcaaatagtattaacatgttttttttattatgttaaatatattaatatgtttaattacaaattatgtttgtcaagggagtctagtccatgatttagcaagatgtcctagttattgtaaatatgctaacattctatttgatttctacctatatatatttatatattttataaattaccttcttaatttaaaattataatgcaagtataatctcaaaaattatatatatgaatattgaccttacaactttttcttttttttacatttaaaattctgaatctgtccatttacattgaggttagcacgactgttagtgctggatcagtatcatgtcatgttcttttgatttgaatgcttctcttctcacttgtcacttaaaagtatggggtacatgaatgagacagggacgatgtctatgttgaccaaaggtggcttatttactaacagattagaaatttgtgatccaaaattcttgtaaccctatgtcctaagggaaacaaaacttatgccaagttttttggggttggtgctattacaattgaacttctttaggacactcatacacacccacttttctctctcttgaaccaacttgttatggttgtctaattattgcacatgttccttattcacattttaagaattagcacaactgtcaagtagcacaaagtgtcgtctcttccaaatcatcaaccacataagaatagtacattctcttctcctatataccccaatgccaaactggctctatggtcacaattcattatggatcaagaattcaagatcctccagtgttctacgataactgcagtgggtgcagttcataatctcatgaacctttcattttcgtttgtaatattttttcgattgaataacctcaagtactgttttacagtagagattgagtatagttttggtgaaattgtagatgatctcaatattctgctacaaattttgtctaaaaggaagtgcattggtatcttttcttgctcttaaatgacaatagaatgtgttgctagaatctaaaggtggataagaatgagaatgttaatttatataaaaaaaacaagaaattaaataactagtattttatagtcgcaactctgaaaaagattttacttaatcaccattccaacttgagggttatgcctagtgatagtgacaaaattagaaattttaagttgtgaaaacaatacttgtatatataaatttgtggacacaatacttaacattataaattgactttttttttccttctcttgtattttaaataattaaattacagggacagtttgtaattacgtgcatataacttaatagaaaaaagttcgtgagagcaactataccctcgaacgtgacaacgtagattcgtcccaatttggtgatatttggttaaagacaaaaaataaaataaaaaattaagaaccttagttcaaatggaaacgagttgtctctgattgcttgatccaataccaaggaggatggttttccttcaatttagcgtatcttatccatcttaacaactagtacttagggcttctttataacaaaaattaaaatttttaaaaaaataccagacttttatgtctacactaccaaatactataaccaaacttaagaaactaaagaaaaaccaaaatatttttttttttttttaaaatagcaaaagaaaaagtagaaagaattagaataaaaaaggagcaagcggattgcacaaggaaaagtagtttacttgccagtctgtaatgaatcactacatttacaaatagtcaaccatactacacatgcactgagaaaatgcaaggaatcaaacagctagctgttgttgttgttgctgcttttgatgagaagattcatcctcattgaagcacaagtgggcctttagtgattgtcctaaatttagggtggaatctgaaaaatttagaggttggatcaacaacatttctctttggagatggacacaataggcttggaaggtgcctggggtcacatttaaatggaaacccaaaccaaagaggaaatccaactcaagaaaattcatctctattttggtgattcctccaactttggcatagtgagcattgttgtagaacctgaaaaatattagaccacatgaacaaaaagagaagattaggtaaatatcatgtaaagtgtttttttcttatagaaaattagtaagtcaaacatcaacaatatttggcatttgtttttctttaccattcatattccacaattgtagatatacggagtaaatgtactagtgagtgtataatatcttgagagggtttaatcttaaccacataattaaaaaatctaaatgaatgatgaagattaggtttaaataaaactaatgtcaactatttacatacatttttggttacaattggacttttttttttttggttacagtcaactatttatatatagtcatactatcaagattgattcttctcttttgttacatttccattaactagctcgctatttttttatgtatataatatattaattagaagatatttgcaggatatgtgcagtaaattcatgggatcacatggtagattgtcacttctcaatggaaactggaaagccagcctggccatagtatttttcacaagcaagattatattttttaaagaaatattgttgtcataaacacagtttattacgtcagagagaattatagaagattaaaaaaaaaaacatcccaaaagtagggaaaaaaatcgggtaagctacaattcacaatttggggttttaatatattaaaattttctattggtactagaatacttcaaaattcagaaatagaaaagttcacgggttctccaaacagaggaaatgcagagcaactgaaccatcatcgtttgacttttgtcaaactaactgcaccatactacacagaattcataagaaaaagagaagagttcaaagaaaaagaaaaaacacataattcataattgtttaacttaattattatatatcaaagtttcagaaccagaaaacatgaatttgaaagtttttttaaggacaaggtgtttttgatttctattttcgaaaactatttttagttttaaaaaaattagacacctatgccttattgccatgctcataccttaatacacggaatacctatccagatgatccacactcaagttaggattacaaaacagagaaagaagatggaaaaacctaccaattgtttttttttgtttttttgggaacagttttcgaaacttaataaattttggataataatattattactaagcagcatgaaattaatttttaaaaaaaagttagaatgaaatcaaacaatgtctttgtattttcagcttacttagaagtttgaacaacaaaaacatgatattctaactttgcaagcctttaaaccacccacgatcagtaactagttaactcaactattgttacatacttacatatacatctaagtttaacaatcaagaaaacttagaatttgaaaattttctcaagggtactaactaatttattaagccacttacatgtcatccatgaacttggcagctaccatgacactagtgatcagcaaacggtgcacgttgaaggagttgatgggcaaagagggttgtctctgagtgaatcggtcgaggtagatgtaggcgacgacgaagcaggaggggctgcaattcgcatacttgaagattctctcaaggtagcactgaattgagatgtttggccttgacaggccatggaacactgagatcttctggtgctgttggaggtgttggttgtgatcatttgactcagccaccctctcaagaagagaggagaggaaaggtatcacttttggcatcacacttggagtctcctctgctatggacattttgcaaaaggtttgatgcaacaacaacaacaacaatgtttgaaattatcatggtgtgggatatttgtaagccacttttttatcctatgctccaagaccataggttaaaggaattatcaaatgatttctttttatgctttttaatgtaataaatgagttgtttttaagaaatatttttcatttttgtcctcttaacctaaggcatttggtgcatatgtgatagaaaaatctactcgcacattatagaaaaaagatcagttgacctgagttgtcaaattcaataaaatgacacttttagtaactttgttaaatttattgaatttgaacagaaatatcttacaagttgaaatgtaaatgttagacttaattacatatttggtttctcctactttctcaattttgcaaatttcgttcttatattatttttacaaaattgatctcttattattttaattatatgctaacctaacatgtaatagagtgtcacattaacatttcattatatatattatataaatgaataaaaaaataggagacaaaatttgtaaaattaaaaaaaatataattaagctaaaatatcatatatagagaaaaagagggtgggggatagagagatcggtagcagtaggtgcttttcttgatgcaaaaatggccctagtaatttaagtaatgaattgcaagttggcacatcagtggtggtatgtgtcctttttcggctataaaagttttggggtttgagttgggtaatgattttgatttcctctttaatttcaaaacttgacttgtaaacgagggaaggctggtgcgtttattgtggattaatgtcactttctcgaaattaagtagtggttttgtagttgtgatttatttgtgaccatggagatggcattccatacccttcatgtgattacatgtggggaatttgagactctagtgtaatggtcccactgtttggagaccctagcatgtgttttgattctggtacaagtgggtgacataacatggatttgctatgttggtccacagcattgccatattttgctttttgttcatatatacttccttgaacacaaaaaaaaaaaaaaaaaacagcatagagctggtgttttttgttcaagattggttcatgtgacccatataaatccaaagtttgaataatagtgttctttttgtgataatattaaatattttttaaggcatccaactttgattagattttaatagatttcgtttctaaaaggtgaagattaatgcgtttaaaaatcaaggaacctacttttttttagaaataaataaataaactaaaagaacacatgctacacaatattagtacatatttttcttagttaaatttaaatctcaatattttcgatacacaatcatacatcaaatatgaacatatcttgagggacagatttaagagtgtcagtattaagtggaggaaattttttttacacaattttttaaatatttaacttctaataaataattatttaataacaacatattttaaaaataatttattattaattttatgtgtaaaattagaaatatgatctactactagaagaaagttaaacaaatattaactcatcaaagacttgtttttcttgtacattttcctttactaatattttttctctcatatatacataaaggatcctaaaagaaaggtggatcaagtcccctgcttggcctccctaggatccctccctacatatctctaatgattcatcacatcataagagactagtttcttttattaaatctaacttttaattgtatttttgttatgtttttgttttatcaacaaatgttaattattaatttgttactttttattagcgagagaattcgaacctataactctttctcttttcaccattagaccaactttatatttcctttttattcttgttatgttgattgttacatagcatccatcatgattttgagataacatgcggaagaaggagcaccgatgattttgtcttattaaatccaatataaattgagactttaaatgaaattttgatactttgaagaccgacagtgctgcaatcccttcagtcaatgtgccattaatgggaagcaacttttcacaaagaaacaacagctatagaatgagatgtatttttgccataagcatcgagaaacaaaacacagatggaactatcggctgtaattgcaaatagaaaatagagacacgaaccttttgcaacgtgacacctttatatgtggatccaatctaacgtgccatgaaagcaaaatagtgtaagatttctgacccacaatgtcatgcacattatctaatttggttaactatctaagcattaatacttagttaaccctcggaggaaactattgtttggagacgggtgcttgttagtgaagaaattaaatagtcatagatcaaacttgggagaaagcatgtcttctggtaaaaactattcaaacctaatgttttgtaaaattataattatgagatcttatgctagtttatatcgttaagctagtaagtagctgtttagttgagtacgtgattaatttcaacagcaggtgatcatcatggttatctagataaccaacatttttagtgtgtacggaaccaacatttttccctcatagaaccaataatgcacccccgggtcagtgagggagaacatgattctacagccactagcaaagttatacgatataataatggagacaaagcaagcataacatttaatttataattcgtgctacatattaattagtttaaatggaacaagatttatatcgggttaattggagtttattgagtatgttagcttatacaatgtcataacgtgatacacaacagagacatttgcaactcgatcttgagtagcttcctattagaagattcgacttgaacttttgtttctcaacagttacaaattgagtgtcattctatttttaaacggcttatttttgttcggttattattaaatggcaacaacgacctctatatgtctcatagtaaacctaggcaatcgctctcaaaataaaaaaaataaaaacttaggcaattgttaaacatacctcccttaactattagatgtacatccctctcaatttgaagtatgctccaaacaaattatattgcctaaacttacctatgatgcactactaaagatcctatacgttggatattcacaaagcccatactataatttctaatcaaggtctatccaaagggaaatttgtattctgcacctcccactttgcatcctacacctcccaaaagatttcaatggacacaaacagtcctttactaggtacctcgattccaaaacgactacattggaatataattttttgtattctagagtaggttctgaagtgtttattctattatggaatagttgttctgaaaatgtatcatattctagaatagttgttctggaataggcgacataacccttcttccctttttcaaattcaaaccatacaggacccgcatgaggacaatggtgccgcgttcaatgccgacgatccaagaagagcccctcatagctccaaatcaagatcatccatcttcgtgcaggtcttgttcctcatcttaactttgtggaaatcaatgtttttggctgttgttgtttgaggattcacattattaattggatctagtttttcttgttcaaggaggtggacctcttgtaggaccttcgccacccaccctcatctatggttagcgtgacttcatcacccacccgcttgccttctttgttgcgtccaatgacatcgtcttggaaatctctgttgcctccgatggcatcgtacttgggaggcgcagggaaaagggagaggaggcgttaggaataaggatatttttttatcattgagactttttgggaggtgtaggattcatattgggaggtgtaggattcatattgggaggtgcaggatacaaatgcatccaaagggggttgggagttatcaatttaggcctaatgttaaatgtatgggcttcttagggtattttgggaaaaatataaaaaatgaaggacatatagataacttcacccgcaaattcaatggtgagcactaaccaaaaaatgggctgatacctagtcttagagtattttgggaaaaatataaaaaatgaagggcatataaataacttcaccaccaaattcaatggtgagcactaaccaaaaaatggactgatacctagtcttagagtattttgacaaaaatataaaaaatgaagggcatataaatcacttccctcgcaaattcaattgtgagcactttaccctaacggcctaacccctttctcccgtccgcctccggtgttacgtagaagcaatggacgagaggctgctgagcggaacagaagaaatagaggagattcatgagtctgcaccaccaccggatcgtagagaagccattagagatcggattaaaacttctttgaaagatctactacagcggtgtcaagttgggggagccgaaaagattttgcattctatacaagaaatagacgtgagtggtgacgactctgtggaagagctgtgtcagctgacaagcaaaattgtgcgatgcataccaaaaccggacagagagattttgttcaagaatggtctttcaaagacactcgtggagattataaaggaactgtatcctgaattctttgtttcacctggtaaattaattatccatatattaggattgaagtggatgtagtagataatgataaaactcagcagcagtttgtatttataccgccatcataatttctaacatgtatgcatattctttctttgatttgtgtgcagtgcataacatcgggattatgattgatgtagtttcggaatccatgattcggtctcccgatttcattttgttttttccggaacctgagactgtaagttataactctcatcaactcttaattgccatcaagatcctttaagtagtttagtgcatatttagatttcagttggaagaactcaaaagctattttacttctaaagcaataattccttgcattcaaatttgcaattatgctatgtaaattactttgaactggaaaatcatttcaatagctgtaacctttaatttgtgaaatattttgagatgtgaagggagatcttaaaatgaaaaatagatgacaaatattttgtcaggtacctaacttttattgcttttatgtacagagaagcatacatcgttacatgaatcaaatatatcgtgatcagtataatccgttgcagatggtgaaaaattatataagtattgaactaattgatacaacaagttatgatctcttcgttcaaaacataattttctaagtgctattcattgctattaatattttactgtcaattggatcattatgttagacctcaaataaaggaaagatatgtagcaaggactcatggcaggtttaggaagaagcctgagcattagtgaaacctgtaactggctaatgccagttacagcttaacgaaaatagaaggcttacctgtaatgcttacctgtaattggctgtaacagagctttatatagttttctgttagaaaggagagggtgggggggggggggggggaattcatttgggaaaatcggttagggaggctgggctcactcctagaattgtaaccggaattcattcaataatacaagagttcttgattgttccatcactgctattagagcattcgatccataaccttccgattgggtgttggcgcgactctgatattgtcgttcaccaaattcggaccaaatttttttccgatttggtgatttgcgagagccagtagcttgcgtctgtagtgatcggtgagagtacatggtgtcgatgagaggaggaatggatgcacgcgtggagtttttggaacgcggtttcgagggactgatccaaacaagagaagagttggctaatctgagaagagtgaacgaagaagacagagcagaaagggcggaattgcgagaacaactagcgcaattaatggtgacggtgagaagcatgtcgggcgtcgaaggaggaagtgaaaacagagatcgcgatagaggtgaacagcggaatcgtgagtctgcagggcgcgagaaggaagagagatggcggaagcttgagataccagttttcaatggagatgatgcatatggttggacgaacagagtagagagatattttgaagtaaaaggagtggaagaagaggagagaatccaagcggtgatggtggctatggagggcagagcattgaattggtaccaatggtgggagttttgtgaagaaaaccctaattggaatgggtttaagcaggctgtgattcaacgtttccagccattgatgagccaaagtccgtacgaattactgttgagtttgaaacaagagcaaacagtggaggaatatagagagaagtttgagctttatgcaggacctttaagaggtactgaacctgaatatttgaagggaatatttttgaatggattaaaggatgtggtaatggcagaattaaaacttcatcctgtcaaatccttgactgaattaatggaggttgcacagaagatagatgagaagaaccagctcatggaaaaggggaatgttgcaagcaatagaggacattcatcaaaagtttatagttcgtcaagaactgtgacttgggaacctggaatcaaatcaaaccaggtcagacataaggaggcagtttctagtagtgattctactagtgtgaagcctactggaacatataggggcaggccttttagaaatctaactgatgcagagtttcaagaaaaagctgaaaaaggattatgttacaggtgtgatgggaaatttggacctggccatatttgtccaaataagcagtttcaagtaatgattatggctgaagaacaggaggatgaggaggaaaaggaagaggaaattggggaagcggataagcagtttcaaaaaatccaactatcattatatagtatagctggattaattacaaaaaaatctattaggttgtggggaatgattgaaggaacacgagtcatgactctagtagattgtggagcttcccacaattttatctcaaggtctgcagtgagattattgaaactggaagtcacttctacaaaaccttatacggtagaagtgggagatggaaggagaattcactgtgaaggaatgtgtagaggggtcaaattacagattcaagatctgcagatcatacaaggtttttttgtgtttgatatgagaggggtggatgtggtgctaggtatggaatggttagcttcattgggtgaaataaaggctaatttcaaagagctaaccttgaaaattcctaaagagggaggatcaattgtattgaagggagaacctgctttaacaaggtctatagcttcattaaattcagttttaaaggctataagaggtgaaggtgaagggtttatgttgtactgtcaagagttgaatgctgttaaaaatgagaaggcagttcctacatggatggaagatttattgcaggaatttgagggaatatttctggatcctagtggtcttcccccttcaaggaagcatgaccatgggattgaactgaagcaaggagctgaaattcccaatgtaagaccttataggtatccacactatcagaaaaatgagattgaaagattggtccaggatatgctgaattcaggaattatcagacctagcattagcccttatgctagccccctgttatattggtaaggaaaaaagatggaggatggagattttgtgttgactatagggcactgaataaaataacagtctctaacaagtttcctataccaatcattgacgaattattagatgaattgggtggagctgtggtatttaccaagctggacttgaaatcaggttatcatcaaataaggatgagagagcaagatattgctaagactgcctttagaactcatgaaggccattatgagtttatggtaatgctttttgggctcacgaatgctccttctacatttcaggctttgatgaatgaggtactgaaaccttatttgaggaaatttgcattagtcttttttgatgatattctcatatatagtagaactatagaagatcatcttaagcatgtgaaagatatattaatgctgttgattgagaataaattgctggtgaataagaagtgcagttttggccagaataaggtagagtatttggggcatattatttcaggggagggggtggctgcagacccaaacaaattggaggtcatgagaagctggcccattccaaagaatgtgaaagccttaagaggttttctaggtcttacagggtattacaagagatttgtgcagaactatggaaaagtggccaggcccttgtatgatttgttgaaaaaagataattttcaatggagtgaggaagctgaagcagctgtgaatcaattgaaaacagccttggcagagattcccgtccttacaattcctgatttttctcaaccttttactctagagactgatgcctgggagctgtgcttatgcaacaggggagaccattggctttttggagccaatctctttcagaaacagctcagagaaaatctgtttatgagagagaattaatggctatagttttagctatacaaaagtggaggcactatttgatgggcagcaaattcactattatgacagatcagaaaagcttgaaattcttgacagaacagaggttaatgggagaggaccaatttaagtggacctcaaagttaatgagctttgattttgatattgtgtataaaccgggttgtgaaaataaggaagctgatgccttgtccaggagaatgacctttacagccatctctatgattcaacatgatgaggaagaggagtgggaaagggagatattagctgattcaaagttgaaaatgattatgcaagatttattggtaaataaggctgctcatctaggatatactttacagaataagaagttgtggtataagggcaaattggtgttgtcaaagaactctcctaaagtacaagtgctgatgcaggaatatcatagttccttggtgggaagtcattcaggttttttcagaacctacaaaagaatagcagcactggtgtattgggaagggatgagacaggacattaggagatttattgctgagtgtgatgtttgtcagcaaaataaataccaggctttgtctccagctgggtttttacaacctctccctattcctacacaagtctggtctgatatttcaatggatttcatagaagggctccctaaagcacaaggaaaaaaatgccatattagtggtggtggacaagtttaccaaatatgttcatttttttcctataagccatcctttcaccgctaaggatatggcagagttatttgtgaaagaagtagtgaaactacatgggtttcctactactatagtgtctgacagggataaaattttcttgagccaattttggaaagagctgtttagaactgcaggtaccaagctgaaattcagttccgcttatcatcctcaaacggatggccaaacggaggttgttaatagaggggtagaaacttacttaagatgtattacaggagagaaacctaagcaatggccagcatgcttaagttgggcagagttctggtttaactccaattagaacagctcagccaagctgactccttttagagccttatatggtcgagatccacctcaattgttgaagggcacaactattccttcagtggtggaggaggtgaacaaattgactagagaaagggatgagttattagaccaactaagaaggaatttgctaaaagcccaagaccagatgagaagtcaagcagataagaaaaggagggatgtggaattgcaagaaggtgattgggtctatctcaagatacagccatataggctgaaatctctagctaaaaagatcaatgaaaagttaagtcctagattttatgggccatatcagattgaaaaggtcattggtaaagtggcctacaagataaggctgccacctgagagtaaggtttacccagtatttcatgtttctttgttgaaaaaagctatttcttctactgcaaagtctcaacctttacctgcaattttatctgatgaactggaattaaaagtggaacctatggctgtcaaagctgtgagaaatttagcaagaactgtagaagtgctgatacaattgaaggatctcccagattttgaagcaacatgggaagaggagtcagtaatacagcagcagtttcctgactttcaccttgaggacaaggtggctctcttggggggagtattgttagacctcaaataaaggaaagatatgtagcaaggactcatggcaggtttaggaagaagcctgagcattagtgaaacctgtaactggctaatgccagttacagcttaaggaaaatagaaggcttacttgtaatgcttacctgtaattggctgtaacagagcttcatatagttttcttttagaaaggagaggggggaattcatttgggaaaatcggttagggaggctaggctcactcctagaattgtaaccggaattcattcaataatacaagagttcttgattgttccatcacattataataacaaatttggtatagagaagataatgcaaccactttgtgaacaagaaaaacacaaccataaccttagtcttgttacttgtatagatgaatggagaatttgtctcacattaaggcaaatagacataattacgttttcaacaaaatgtagacataattaaggcatgtatcattttgttcttttgtcccctgcaatgacatttccactgcatgagatctaaaccattgaaattatttaatttattttataaaaaatatattataaactcatgtttaaaagatacatatggatgtgattagttcacatgatcctctcatgttaactttcactataggagatccttcttcatacattaataaaatagaccttggatctaaccaagacaaacttaaacgtttaccatgtgcttgtcctcttttattatgttgattgtttgatatattttgttgtttttttatctaacatttattgtgagaaataataatcaatatttgcaagttctccaagattttgaaagttgcattagtcaatctttttataataattttttggttaaaatatattttcgatccctaataaatactcaaattttgtatttgattcctaatttattttttctttgtgtttgaccatctattatttcatcaaaattctcactcaccaacaatattctccattgtgattgactatcaacagggccattctcatccccccaaccatattgtgatgaagattgacgataatggggtgttgaatgaaaataatagagaggcgacggaatttaacagatttctgaatgttttttgggacacgctattccaatcacattctacttatgaacatcgtcttactgcctgggctaccttatgtggaatgctagcggcccaactatctgttttgggaaaccctctagacaagttatccgaatcaagagacactgacccagtggaattaagtatagtgaaagcatgtcccataacagtatgggtatcaatgtttttcctgaactttatctttgtagcaatgcgtacctttccattgcctcatcgtatacccgcatactcaatattgggattgtctttactacattttagcgataatagctgcaatgtctggatctagcgtttcattgagtggttcagttaaaatatcaggcctattatttgtgtttggaggggccacatgcttaatgctacttcttagcatcataattatcggggtgctctatgctgcatggtgctcctctccggatttgaatgtaagtttgggatcattcctcttcctcctccataatacttcttattttttctattaatctttctttcacatcctaaactctatattacttagacttaattgcattttttatccaaaccttctagcaatgaaactctaatgagatcatatttgacaaaagatcccctatatgttctagcaaatcattttccactagtcaaaagaaaaagaaataaagtatcaaaagctactatctagttggttcaataacatttgagagtcatcatccatgttttcactgtcaacagcatcatcagttctatcagttatatcaatcttgcttggcaattcaccattgtcaatggtaccctcaagttatattcatacttcattttgatttatctatggagggtattatacagttggtttacttcttttttgcacctttagttcacaatgtgacatgcatacaattgtttacatccatttaccccattttatatccctttctggtatgcttgtatactctacctatcttcctttttgtgtcactcaaacagtcatagcacctgcatatatgtccagacacataatatctttaagcaatagcttttagcattacgtgcattattgccctttgttaatttgtttgataactggtttccatattgtacgtgtgatagatctttcccctgcctttttgtaatgttaagcaaattggaaactttattggaggaacgatgcatttctagaagctacctttttctttcattctgacatttgattttcaacatgcaggttccagtgattctggacgccgcaacttctcaataaattgcaaagacagaggtttttggttttagaatgtctaaatcaagcccttatggcacatctggtggtggttttgggtcaactaaagccgggtcacttgatttttagactataccttgtctataacagaagacttgtttcaaccaaaaatacaatagaaatagtgagtcaggctcagttttcttagtgcttgaaatttagccttctaaattgtgttactcttctttttgttcttttgatgatcaacttgtttcaccattggttcatctgcaatgtacagacattttctttaaagttagtataacagtgagaatggcgagtatcagggaaaaaaacataatgaaaataatgaatataagcaacagtgttattgattattgcctaattatgttgtcacttgaccttggtcatggcacacttgatacaagtgtaactacatgtttcttagtttcccattatggttggcaaaaaatattgattactgtaactttccctggagatttttgtctagttacacaaccatgggacccagaccactaaggacaatttaaaatatgtgggttagggttgtcatcccatggggaatgggtatacctggtattaagttttcatataagatgcatgggtatgataccctgattaatattatatttggtgcaacttgacgagttggtcacactccatgattgtgttcatgcaagaattattatctgaaattttgtagacgcttataggcatgtttggataccaggcaagtgcttttgagataattctttttattgaaaatataggttttttagagaaactttcaaaaactatcaaaatgacttgattttgtattcaaacagattctatgtaatgtagctttaatttattcacaagtcaggaagtttagctttcacaaaaaccaactagaactcaacctttacatactatggttttgtttaatatttagaggcatatatatatgttttagaatgttcattaaatctaataccgatttagtttaattattaccatctaatatataaaaataataattttcttaaattgcaaaattgagcttaacataaaaggcttaaaatgttaaattgatactcaacatttgctcaacaacaaaatttagttgatgagtaacatcttgtttttcaaaatcgttagtggcagaatagcttatctgtgtcttttttaatcacaaaaactgaagtcgcaaaattgctaccaatcaaaaagtatacaatgacactgcattgtaaaatttatatgaataattaccatgacaatgtggttgcaagtatgtgaggaaataaatcaacttattgcttactagtgagattataagaagttccgaatacattcccagtcacaaaattgcagtgtagttctgaatttaaattcaaaatgacaaaagcataatccattatagcattttatagaacttcattcatacgctaagcaactcgagcctaattaaaatgcaacctcactaagatggcaaagttcttccgatgctattttttttttcctttcaaaaaactcaactaaggtcttacttcagacgaactaagtttcttggcatttgagttatcaggtggtggcaaaaaatggtacacattttaataatagcaagtctatataacaatatcgttgtataaaaaaccattttcatgttgagaaacaaaataaatccagttatccagtgaccttcgagcaatatttgggcagacgaaggtaggataatttcagtcaaacatgtggggaagtggtctgatagccataaatgcatccaccatctgaaagaattatggagaaagagaacatgtaagttttgcaccatataatagagacaacaaacattctcatcttgttcccataaaacaagttgaaaactctcttctacccaccaaaagaatgtttattttgagaaagtcttgattgtcacattccactaactttttccccttcgatttaatgaaaataagagcacagaaaaaagtagagtgagattttttttctccctctcatttggaggattgtgacctcgaatcacaagtgtagaagctggggattattctccattcattcaataataatcattcttgttcatttctactctctttctttacttttttgctgatccagtgcctatcactggtatcagagctccattctggggctgtgggtcattaatggcagcgaagaacacgagcaaaatggaggcgcgagttgaggcactggagaaggtcttggaggagacgcgtaaagccagagaaatggaccgcgaagctctggaggccaatcgggtcgcattggaagccaatcgggtcacgatggatacccgattgggcgcaatcgagtaggttctgcaacaattggctgcgtcgttggaaacgccgaggttggggctgaaagtgacgacgaagggggcgcgaaccaggagtagggaaggagaggaacttggggcgcgacagtggaggcaaatagagatgccgattttcacgggagaggacccagtgggctagatttcgagagtagaaaggtttttttggcttcaggcagtaagggaggaggagaaaatggaagctattctggtggtcatggatggggaagctttggcttggttccaatggtgggaatcatggagcttgaatcaatcttgggatgaattcaaaagtgaattggtgcagaggtttcagagctccaatctaggtaatccatttcaagctttactttctttgaggcaagaagattgtgtgcaaagttatattgggcttttcaaaaagcatgtgggggctggaaagggattgggagaagtttttctgatggaggtgtttgtgaagggtttaaaagaagaaattgggacagaagtgaggttacatgagcctaagtccctactggaaactatgatgaaagccaggcaagttgaagaaaagaatagagttctggggaatctgcccagaattggaaaatggatacctaatgtccaaagaactaatttttcaggaccaagaagtgggaaagaagtgcagcaggggagtggtaagttgctggaggctgttgggggagtgaaaacagggggagaacagctgaataaaaagaaaaatttccatagattatctccaatagaggtaaatgaaaagatgaagaagggtgaatgctttacttgtaataaaaagtatcacgcaaaccatgtttgtaaaaacaaacagctgagattgatgattatggaggaggaagaggaggaagaggaatggtgggatccagaagaaggtaaatatgaggaaaaagaggaggtgcatcagctgtctttacatagtattgaagggtttacatcaaagaaatcactcaaattgtggggaaacattaaaaacaggaagatagtggtgttaattgattgcggggcaactcacaattttatttctacaaagttggtaaaggaattaaaattggaagtatctcctactcaaatttatcatgtggaggtaagagatgggcacaaggtgagctgccaaggagtttgtaagtctttgcagcgaaacgagagaaggggccaagagggaaagcatgaaatgagagaacagaggcactaaccaaaaaaatgggctgatattttgtgacctagtcttagggtattttgggaaaaatataaaaaatgaagggtatataggtaacttcacccgtaaattggggttttctacctacttctgcttcctcttgcagtagaagcaactcttgagcaaaactgaaatttattagtttgtaaacttgctgaggctgctgagaggaacagaagaaatggacgcgatcaatgagtttgcaccaccatcggatcctagaaaagccattagcgatcaaatgccagcggcaatatgggcagccgaaaagattttgatgggagaaatatcctagagcggcaacaacttaatgaaagtgctgatgagcaaaattttgatatgcaaaccaaaaagggagacaatggcggaagctctgaggagaatgcatccagaaacggtgcttgtaaatggtaaattaatatccataaattaggattgaagttggaagtagtagacaatgatattacttagcagcaatttgtatttataacgccatcataatttctaacatgtttgtatattctttctttgatttgtgtgcagtaccgattaacatgaagggtgtgtttgctgattcagttagggaatccgtgcctctatttagggaagccaaagaggtttttttttatggaagatacagtcgcgagggtgtgcggatccaagtttgggcctcagattgtaagttataactctcataaactcttaattgccatcacgatcctcattatctttaagtagtttagtgcatatttagaattatccttttcatgaaattatgattttttattatacaattttcacacacttcttataatagtgcaaacatgattttattatatattttttctgtcctatatataacaatgaaacatatttctattgtataaaaataggtgtgataaattacattaggtaaacctttttcatgtacaaaatctaaaatggaaacacgattttactgtgtaaattttttgcactcctttcatataatggaaatatgtttttcattagataattttcacaaaaaaattaattggaaaattaaattagtttttttacttgaattacttttgatacaattttgagaaatgatagagaccaatagcaacttcaatgaaatcttaaacattatggtactgtttgggcgacattatatgtaatgtaggagaattgggcctactataggctttggcaattcttttaacaagtacatttacatcatgcaatttcaatgttgcattagacatctaacattgtattttcaaaaatcatttcaaaatccaaatttacattttgaaatgagtttttcagaatataatgaaaagtgtgggatgcaataatagagatgtaggatacaatagcctttaacaagctatctcatttcacaagcattggcatgcttaaatatagtttttgtctaatgcaaatgcctaccttttgttttgcttcgatttctctctttgtgctcaactaattgaaaaatcaattaatagtttttctttcttagagcaagacgaatgaagcgtacccttactcgctgattttcgttgcctgatttaggagaatgaaatgggtcgtgatcgcaagttgttggtgtgcctcaatgaagcaaattctagttgtttttagatgccataaattgtcatgtaaaatttaaagtaaatattggctgttttagaaaccatcaaaactcgcatttcccaaacattttaacacttaacatttttaacctaatggtagggaccagaaacaaaaaatttcaaatatcatggatcaaataaagaaaataatctcttatgagcaatcttctctatgatctcatatggtccatagtaccttggactcagtttctggttcaatctcttggccagtttcttgagtttgtcggattgaatcttcaaataaaccatatctcctaccttgaactcaatgtctctcttatgagcatcagcttgttgtttcattttgttttgggtttgggtcaagttttccttcagaaccctcaataatttattcctatcttgtgtcatctgagtcacttcctctatagatgtctttggaacatcacccctcacaatagggggaggatccctaccatataaggctttgaatggtgttattttggtggctgagtgatagtttgtgttgtaccagaattcaacccagctcaaccacttatgccactacttgggctttgtgccagtcatgcaccttagatagatctctaaacatctattcacaacctctgtttgaccatcagtttgaggatggtaagcagagctgaatttcagtttggtccctgccagcttgaacaattcagtccaaaaggaactaataaagatcctgtctttatcagagactctagattctggaaaaccatgtagttttactacttctctcaggaagacctctgctacttccttagcagtgtaagggtgagctaatgctatgaaatgagcatatttagtgaatctgtccaccactactagaatagtatctaggccccctgccttgggtaagcctcctatgaaatccatggtgatatctgtctaaatctattttggaataggcagtggttgcaacagcccaactggactaagtgattgatatttgttcctctggcacacctcacacttctgcacgtattcttgaatcctcttcttcattccttcccagtaaaacatggcagcaatcctcttataggttctgaaataaccagaatgtcccccaagtgcagtatcatggaattccttcatgattaattccactttggaagaagccttagggacaaccaacctatcttcatagtagagtctgccattcttcatcctgtagcccttgtgctcactgcccttgatgaccaattcttgaattaatcccttcaatttctcatccttgtcaatttcttcttcaaggtcagcccaatctaagaactgcattgtagttatggctgcatattgcatttttctggataaagcatcagttgctttgttctcaattccttgtttgtatttgatctcaaaatcaaatcctagcagtttggaaatccatctgtgctgttcctcacccatcaatctctgatctgctagaaacttgaggctcttttggtctgtatgaatcacaaaacgcctccctagcaagtagtgtctccatttctgcactgccatcaattctttctcatacacagacttgttcaaagctctatcaaacaatgtttggctcatataagccactggcttacccccttgcatcagaacaacacccaatccttttccagaagcatctgtttcaatcacaaaaggtttctcaaagtcagggatggccagaactggcacaattgtcatggctcctttcagcttatcaaatgcctgttgggcagattcatcccaattaaactgatccttcttcaattgttgtgtcagaggctatgcaatcttaccataaccttctacaaattttctataatacgcaatcaatcctaaaaatcccttcaatcctttaatgtttttagggactggctagtctaccatagctctcactttagcaggatcagctgccactcctagcccagatatgacatgtcccaaatattctaagctgctcctcccaaaggagcatttctttctgtttactactagatcatggtttaacagaacttgcagtatagttctgagatgatccccatgagtttctaagcttttactgtaaaccagaatatcatcaaagaagaacagggcgaattttctcaaatatgggttcaatacctgattcatgagagcttgaaaggttgaaggaacatttgtgaggccaaagggcatcactagaaactcatgatgaccctcatgtgtcctaaaagcagtcttagccacatcttcctctttcatacgtatctgacggtaccctgattttaagtctaacttagaaaacaccttggctcctcccaattcatccagtaactcatcaattactggaatagggaatttatgtggtacagttaacttgttgagggcacgataatcaacacataacctccaacctccatccttctttttgaccagaatcaatggactgctataagggctgttactaggtctaattattcctgttgatagcatttccttcacaaatgtctctatttcattcttctgatagtatggatatctataaggtctggtgtttggaatattagccccctcttttaaaattatggcatgatcacaacccctctcaggaggtaagtcagtgggttctctaaacaattctacaaattttgtcaacatagttcccaaatatggctcattctcctcattgctggtgtcagtgaaatcagcctcaggttggtatgaaatcaagtagccttccccttcattatgcaacatcttaatcaaggctttccaagaagcctgagttttgcacaaggaaggatcaccttccaatttcttcttctcacccttgtctctctagttcaaaaccaaacttctaaaattagctctcacctctcctaagctagccaaccaatccattcctagcaccacatcagtccctcctagctccataataaagaaatgttgtacaatgaccaccccttgcactacaatttttaaattctgacacattcctctattttttagtatctcaccactgcccacctccaccagaaattctggtgtctccaccacatgaagtttgagttgttctactactttcctgatataaagtgttaggccacagataaaggaagtatatgcagcaagatcatatggcaggtttaggaagaagctagaacagttagtggtacctgtaactgacaactgtcagttacagcttaatgggtaatagctttagttacctgtaactgagtgttaccagttacagttgaggtagttagctttaaatagtagctactaagctgtgaatagggaggctggtattatggttggttggttagggaggctaggctcaatccctagattgtaacagaactacagagaaataaaagaggagattaatcattctctatcataaatttactagaagctccacaatcaatcaatagcaatataggttcattcttatagtcccatagttttgaagaatctattggatgtcaaaccttccttgctctttagagatagctgcattactttagcagtgaggacctcagggccctcttgctcatcttcgtcttcttctcctgaatcttctcctgttcctccttccaccaacactatctgataatgtttcattttgcagacatgatctcttccccaagtttcaccacattcaaaacataaccccttcctgcttctctctccgagttcagcttgagagagttttccaccacctactgtcttcctgtcagccatctcaccctatgcccctttgctgctagttccctccttatttcctcccttctcccatctagtgaaacctttagtgtgttttgtaacgccacgtgcaaattcagggtcattaacaatcattaatcaaccatcaacacatataatcatcagagtttaagcagtttggaagcataatataagagtgtcatcatcaaatgccactaatataactactgtacaatataatgtggtgaatatacataaaggctctgtttaagtacaaaactgtacatacaactcccctcagggtaccaaaactaaacaaaggcaatatacaaaacatcagagccacagactcatatcatccatgcctaaggtttacaaatagcaactatccctgcataggcttcttgccttgggatctatctgctcctcctgaggaatcatctgcaaaacataagccccacaaaaggggtgagatataaaatcccagtaaactcagggcccttgaaggtatttccttctcctggttcacttcagacatgtacatggaaatagtatatctaaatcagccatactcagattctataccagaaaattactcaaacatccatcatgcatacaaggatctcatttcccttcattaaacatcatttgcatcaattcacatccacttgtcaataatcaggtgatacacacggcctacagccattcataacatacatcactatcctgcagaggctacatctatgtatataggaacatctccacttaggaggctacctttatatactaggaacatctcatgcccggatctcaacatatctatctgaggccacatctgtatatataggaacatctccacttaggaggctacctctatataacaggtacatctctttctagggaggcttcctctgtatatataggaacatctcaatcaggaggctacatctatataacaggcacatctccacctgataaggctacctctgtgtatataggaacatctctacttaagaggctacatctatatcacagacacatctcataatttatctcaacataattgcctgaggaggctacctctgtgtatataggaacatctccattcgggaggctacctctatataacaggaacatctcacaacaggtctttctcaatctcatgtcatctatcctactaccataggattctattccttcacagaattcacattcaaatctaatagtcaaccatgcatatcataggctagacaattcatagccatacacatcaatctcccatcacagggttcagattacatttcaggcatctcatatcaatacacatcaattcccccttcacagggcacataatataattcaacaatcaatcacatcatcatacaatttccatatacatgtatttactcacatcaaaaccatcactccatctggagcatggtggaacacagtaaggacacacatgcaaggaccaagagcttacctgctctaggcacaacaccggctctcctggcttcgtggtcaccaccaccaccagaactatcaagctcacgtcctacataagagcaacacataacttatcaataacggtcctaagccattaaaacgaaaggaaactataatcctttctgcataacacataatcaatcacttcacaagtgattctcagaccctccataggatccctctcagcctaaccaaggctccagagcctctcctaagactctgtttaggctaatgtaaagcatatccttgctttagccctctcaattccaagcttttcaatacaaccaattcagttcataaacaacatctatactatctcatgagcaactttatcaactgctctaaggttcataataaccatataaccaaccttttctctactcatacataactcagccaaaatcaaacttcatcaataatgatgactcaaggctctaacttcatcagaacaaccctctgaacacaattctctacagggtccaagcctaataacaactctaacacctccaaaaacacttctcaaggtacctcaaaatccaacaaaacccaatacacaaaaccaacggctagagctcgagtttcttacctctaggaagtcaaggaaaaccagggaatcacttttcccaagatagatcgcccatgcaaagcctcctttgactctgggttttaagctgtcaaggattcccctagagaactcgatctcgctgtttaccgcctcttgtcgagaataaagcttggtctctagcttatctcgaggcttagaacactttctgagttgggtcggaggtgtttagatgagaaacagagaagatatggagcttccctggtcatcaatggctgctgggcactcaaggaagaagatgactcactctctctctgccaattttcgtccagaaagagctatatataaggttgacccaaagatctcgcgcggatcgcgccataccccacgcgggtctcgccatttgttcgaaagcactgccctgattcgaaccttccacgcgggtcacgccaaatggccgaaagcattgccctgatttgaacctcccacgcggatcgtgccagatccacgctggtcgcgcgagatggctgaatctgcctcttacttttcttaagcttcctcttgaaaacaaatctaatgcatggttatgttttctaatcccaaggcttaatcccatgcttaaattcaaggtattacatgtttcaccaatggtttctcactcatcctcttctctgagctcgtcagcccagccttatgcaaggcattgttcttttcttccaataacaacgctctgtccatcgattcatctaaggttctagaggcgtgtagtttcagtttagcttgaatttcttctttcaagccattgataaaaatccccttcagcataatcctctcctccttcttcaatggagcagattcacgctcaaatctctctctgtacttcattacagagcttgtctgtttaatacatagtaacgggccaaacgggttctacaccaatcccggttggaaatgacagatcaatgcagctttgaactcttcccagcttagctcttcactctgatcttcctaccagtgataccaactcagagcctgatcctctagggcgattacaattgcatcaagcttgtcttcctcttccaccatgttcaatttaaagtaacgttcagctcgcacaatccacccatatgcgtcgtctccacagaatatgggattttgagctttcttcctccaaaatcaaacgacgattcatgactgctacttcacgtcgtctcactcgcaccatcatcactttccactacgcctccttcagcttcatttcgctgtctgttcgtgcgttgtctttgcgttcttccactatgagaacgactgtgcgaagtgattaggttcttcagctcagctagctgctgttccaagccatccatacgtttttccatcacgtttcgcgtcaacaccatgcactcccagaaacgagtgcactgataccactttgatagaactcacaaacagagaattagaaaggaaacaggattacttgtattatgacagcaattcagaggatctctctgaattgttgtaggaaattacaagaaatatgggtaaaaaacaatataacagtgtagttggcaaaccagtagacaattcccaacccagccctgtcccaatacaagcctgaaaagcataaagtaaggctacctcccctatatacacccttctctctccaaatcagcaaatcaactgcaatcattaacttctccaaagcagtagtggtgccccaccccccacggttccatttcccacattcataaaccttaggggaattcctagtttgtcctttattaactaggtctgtatcagtctccaactctctgaaccaccaggaaccataaatgcttctttcaagcaggacagggcttcagaaatcctcttatctgcaatgtggccctcagaaagaatctcccatgtatttgaatttggaatgaagccatcattcgacatctgctcaaagaaactaaaaactttatctgtgtcttctttcttaacataccagcctatgagaaggtttccaattctaggatcataacttgactttactgaaatccattcctcatatagtttttctgcaccctcagtatcatccaatttaaccagagaagaaataatagcatggtatcccaagtttggtatacttcgaaaaattgatttgtaagtattccacacacgatacacttcgtctttctttccaacacttccatataaactcaggagataatgaaaaggtattctatctcgacctttaattccaccctcaacctttcttaagcacttttctgctttttcattctgatccatcctaatgtacatcgaagccattgtgctgaatgtagaccagttagggacaatggtaggatccttttgcatttgttcaaacagttgttccatcttttctactgatccttgagatccacacgaagataaccagatattatatgtatagatgtctagctgtatatttttccccatcatttcagaagccaacatatcaactttagaatattcattaaggttcatgtacagagtcatcattacattaaatggtagggcatgtataacataccctttactcctcatagtatcaaataaagattctgccttttcctttgatctagaatgcacatatacattcaatagggcaccataagtcttcttatcttttaacttatcttccagactcagaaagaatgcttatgccctagaaactccacgaacttttgcaattaaatctaactgaattgctgcatcactctcagaaactctaaaccgctctggtctattgttcatccaataatatacctgaaacattttctcattgctttcaaaaaattgtacatggctgataaagacatttgaagcaaataagtaaacataatcagaaatggtaattgatttcataattcataattccatacattccaaaggaagcatgccattaaatatagtggcccaaaaaaggttttccagattattcaaattttactgacagtgtttgcaaatctagaattaacaactaaaaatgttgttacagattatgttattgtatatgttcatttatcccataaaaccaaatgccctaaataaataataaagaaagaacatttctgatatagcttctatggaatcaatcaggtcttgttatagtctcatatagcccacccctactcctttccctggactatcttttgaaacatgctacatttttctgacaatgccaaagggggtgaagcaatctttgtttcctcggagtgaatgatagtccaaatgttatacctcacactgaatatgtcgtatgtgtgtgttattatacaatttggtgtccatttgtgttgctttagtctttgaaaatgcataactatacaaattagtaactggaaatgttaattcaaagataagttcacctaataatttcgccctttaaaaaactattttttatttattgacaccaaaacagcacaaattgagaatccccccagctgccacggtgcaaaaaaaaaaagtttttaaacatcatacttcaacccctaatggtatgttcttctatttatttggttggagagaaaaaggaaagaaaaaaaacctctacaaacaaaattcaaatttctctgttgttttccttccaccctaccaaacagacccttagtttttctcatacagaactaattcttatttattcctaaatgtcaactatgggaccaaatcatggtttaaaatacagtccacaatagcagtttttgccacactgatgtttttttgaatttccgcaactgcaatttctcacaatatcaataatcacaacaacaccaaaaccacaatttaaaacctgggaccaaataattagttttatgaagaagaaaaactataggctgtctagataaacttctctataagcacttttaggagaagaaaaaacaaattagcttctccttaagctcatattagcttagcacaaattaatttgtagaagctctcttcatttagcttctccaaaatatgttttttcacctatgcacatggttttaaattacggtttacaacgtcaacgtattttgtcactctgtaatcgcatcacaaccgcgattgcagcctgatgtgttgcaaacacatcttagttttaggatagttttaggttataaattagataaataagttaggaattagaataattagctaagtttattattatatttaatttaatctcatatcattaccatttgtgcattttagggcttaaaagaggagaaacaaggcaagaaaagaagaaaagcaagtctgaagtcccacgcagatcgcgccagatcccgcgcgggccgcgccatagtccaaaatcagcgtccaagctcgaagactccacacggtcagcgtgagaaccgcgtcatccgcgccacaaggcctggaagtagttttagttcatccaaaccgtgcgattagcgcgggatcccgcaccatcagcgccacgaaatcgctgttgcctgattttgcaagatttgattcgaaattggcataggagacaggcctagttactctaattaaatctatctataaataaaggcctctggggactgaacaagacaacaatatataccttttaacacctctccacacttccacacatcattctaaacccttggaagacaagaatcaaggctaggtcactgcagaatgttttatttgacagcttttggtttcttgaagcctatggcaggctgaacttgtattgtgggaaggccatgaactaatgagaactcctttgtaacttgactgatattgagcaataaatgttgttttgattgttttattctactctatttttattgtttattcttatttggaattggccattctatctaagtattgagggttaggattcgcaatggggacgttgggattctaatttctgacttgtttagaataacagttgttcatcacctagggatagggatgcatggctccagactttataatatggtcttttgaatgcttaaactgatagacttcactaaggaattatgtttttgattcaggttaaagggttaattcactaagggattaaggattaactaaattaggaaagatttatcctctgagcaatcatacaagaacacttatgatttattctctaaatgcttaatttgacagtatcgctaagggcttagtattctcgatcgaattaaagggttaagtcgctacttatctaggatttacgaatataggagagatttattatttgtgtaacttaaactgataaaccagtcaagtgaaagaggtatgaatcaaaggggattgtgcctaaccacaattgtgtcttccattggtaacatttttactattttactgcacttatttaatttctgtttattattcaaacaccaagtactccaaacaattcttctttattttctgttttattttcaatcacttagaattataattactgtgaatttcaccccaatccctgtggagaatgatactctacttacccacttatattacttgaaaacgatcggtgcacttgctgtagtgtgcggtttttgcaacaagtttttggcgccgttgccggggattggttaacggatttttgcagtaatttttaatcttcgtgattggaatttttattactaattgcttctccaagttttatgcgaggtttagtcaatcctgaggatttgcagttcgatcctgaaattgaaagaaccatccgaaggagactagccatacaaagaagaagaagaagagaagctgcatactttgattttgattcaattccagaattagagtcagagtcagaggaagagatggctgaacaaagaaacaatcagccaagacttgaggatgaactgatggggcaaaagaacccaaatggtgttttttttcaaaatatttaccgataaggggctgtttcacaaatatttacagaaatggggttgtgtgacatgaagtatttacaaaactggggctgtgtaacatgcctggatcaggcatgttacaacatgcctgatccaggcatgttacagcaaccccaattctataaataagcgcccccccacccagttcctcatatattggcttccagtgttgtctgcctctactaaactgccatcattctggtgtttttttcatttttcatagatttttgaaggtgttgtgagtgacgagaaacatgagttcaggtggtaattctgttcgcgttgtcttttatgttatgacataaaccacaaatgctaacttgcaattactaaactatcactacacatacgtcctctcgatccagggattcgaaggctgtcctgtagtacaccaggtcgtgcgagctaagccggggtagtcggttaaacctgttaacaaaacaactaacattaaacaatgtacgccttaattgtttcagttgtaataaaatgaacatgtagtcacacatatcggtggccaaaatgcgctcgtgggtcactaggctgcggaatacatggagcagttggtgggaatctcagccacgcccacgcctgaagtaacatatggcatccaccaatgtcctttctggacgcatctgtacactcgcacatctgtctaaacaaatgtgcaaggaccgcagagccccagttgtatcctctgatatctgggaaatccacagccaacaaagggatatagtgtgctgccatcacgctacctccagatcgatcgcccagcagccatgaaccaataaggcgagcaatgtgcgcctttgcaaaccgcgtcacattgggaaaatctttgtccaactcaccccaatctccaaaatgcctatcgaagtaactcagccttaggtatccaccggtcagctctgtgtcgtcgtcaggttcttcaccgaaaacgtcctcaatcacctctgtccaatcggacaaagtcactccggtgacggcattgccagccgtgggcaatcccaaaattccagccacatcttgtagcgtgatagtcatctcgccctgtggcatgtggaacgtatgggtctttggcctccatcgctcaaccagagcactaatcagggcagcatcaatctaaaacaatatcattaatcaattgacaactatagttatggttaaatcaaatttgattactagtatgacgtgttccatacctgaatatgtcgcatgcgtgcgacatgaagaaagccagtgtcccggagcatatcagaaacgacttcaggaatgtcgtcatatgctggtccccccgacgccttgccacgtcgagtctttagtaatcgtactgtgccctcgttccacacagattgtgaaacatgggtatgttgcgtacgcctacgcagagcgccccatctgtacggggtaggaaccacataagatgtcggatccatcggctcagcctcatgatcggatacagagcgaggcgaatcagatccagataaatcggccatattatcagtaacttcatacaccaaaaataaaaacccatgttaacaattatttaaaattcactactcagtaaaacaacaaatttctgaacactagaccccatttggcctacacccataaaccctaatgaccgcaccccgaaccctgaaccaaaccctaatccatgcaaccataaccatgacaccaaccctaaagtcaacgctggactaaacgtcacatacgtggccaaccaaacactaacccctaaaccctaaaccatacaaggccaaccaaaccatacaccgcacaccatcgtcacatgactatgatccaaacgtcaagaaaccatgcccaccaaaccctaaaccattaaccacaaacgaatatcacataatcaaaccataaacactacctaaccatgcccagaaaaccctaaattttaaattctaatcattttagccaaaagtacagtaccaaacatctaaagaattttctatccacctaaatttatgtcactaacaaattaacatcatcctaacatttttctaataaataaaccttaaagcctaaactaaaacaattatcaactaacctaacatctattgtgctaaaaaataagtacatgcatcattaacaatataattaactaattaagaacaacatcactaaaaggcagagcagagcgcttacttgttcgcaagattttctctgaacaacttcgaaattcagcagagcttcgctgcacagaatatccaccgaaaactctagagagaaggcagagcacttctagagagatagtggaaagtgaggaaatggtggggggggggcttatttatagaattgggcttgttataaaatgcctggatcaggcatgttacaacacgcccaaatctaggcgtgttgtaacatgcctgatccaggcatgttataacaagcccaattctgtaaatgttgtaacatgccttaatccaggcatgttacacagccccatttctgtagatatttgtgaaacagccccttatcggtaaatattttgtaaaaaaacaccatttaggttcttttgccgaactgatggaggatattctgtctccaatgttcaccagaccccactccagcattgtaaggccaccaatacaggctaaccattttgacataaacccttcattgatagtattggtggaaagaagtcagtttggaggggaagactctgaggacccacacgatttcatagacagatttctaaggatttgtgacactatccaacaccaaggggtctcagatgatgcggtaagactaagcctattcccttttgatgttaagggaaatgcactgagatggttaaatagacaaccatcaaataacatctcaacttaggagaacttaatctcaagattctttgcccaatatttttccatggataaatacaaccgggtggtgaatgaaatcactaactttacccagaatggaaaagaatccatgtgtgctgcatggaatagattccaagaattgatcaggagatgcccacaatatgacatgcctgtgggtaaacaggtacgtattttctttaatggtataactcctgaaactcgtatgattgttaatgttgcagcatggggcacaataagatcaaaaactgcagctcaaacatatgagctgattaaatctctggcttgtactgaaaataaaagcatcaccattcagccaaagagagaaccaatacaattgtgcagcaatgatgccatgcttgcagagcagaaaattttagcccaacaattggctaagttgaatgacaaaattgatagattacaagtctctgcagcccaagtttcagccagtaaaccacaagtcagttgtgaatactgccaaggtgagcatgactctaatgtttgtcccattcttgttggagctgaccctgtgcaggttaatggcgtttggaatgatcaaagacagcagcagccctatcagagaaacaacaattttgctgcaggaaaaacctaccagaggaacatttaaggaggaggattagactacaagtccaataattatctacagccccatcctattcccaccaccagtatttctgaacttgagaaggtagtaatgcagctgtcaaaaacaacaatagaatttatagcagagactagagctcaccacagaaatcaagatgcctccatctggaatctggagatccaaattggtcacttggcaaaacaaatttttgagaggccacaaggacagttccctagtgacactgttataaacccaagggaacatgtcaatgctatcaccaccaggagtggaaaagtgctcaatccaccaaaaaagcctaaagcaagcaacaaggaagctgagaagaaaaatacaacagctgatgcagaagaaaaatctgcagaaaatccccaggaacaaaaatctgcaccaccaatgaagcaatgggatttctttcgctttgagaaacccccatatccagtgcagaccaagcagcaactccagaaacagcaaattgccaggttcttagacatgtttaaaaagttacacattaatattccatttgctaaggcattagccaatatgcctaattaggcaaaattcatgaaggaacttttgtctaagaaacataaactaaaggactgtgaaaccataacactcactgaggagtgtagtgccatcattttaaggaaacttcctcctaaattgaaggatcctggaagttttaacatccctatagccataggaaatattaatgtaggaaggacactttgtgacttaggggctagtataaacttaatgtcattatcaatgtgtaagtccctaggcataactgaattaaaacccactagagtttccttacaattagcagactgttcattaaggaaaccatcagggataattgaggatgttttagtaaaagtagacaagtttattttccctgcagattttattgtcttagatatggagggtgaaagtgaaatccctctgttgttaggaaggtcctttttagcaactgctagggccttgattgatgtagaatagggaaaattggaactaaggatggataacgagtctgttgttttaatgtttttaatactgtgacaaatccatccgacatacttaattgttctaggctagattttttggataatgctgttagtgcaggttttacagcagatgaagaagctacagaagagaatgcagctgcagcagaaaattcagcaacaagtgcagcagagcagataggaaatgcagcagaaaattctgcagaagcacatataacaacagcaataattgctgcagaatccagcaaaacagcagacaccattgaaccggtgctgaaagtgctgcagaaaaaggaagatgatattctggtgggagcaccaaaggtaaagctgaaaaagatttcagaaacagctgtggcaacatctgagaagaaaggtgctaaaaagctagatgctgtgcaaaagaagcaccaaattgcaggacaaatacatgtggctgcagatgagaaggctgaaatctgcaagaagaagaagaccaagaaggggcgtaataaaattcgccaaaatgaacttgagtcaggacaaaaggtaatgctttcaaaatatcacctgaagtttccaggtaagtcagaattcttttgggatggcccatttttggtacaaaaggtttgttcttatggaatcatagaaatcactacattaggcaaggccaagacctttaaagttaacaaatgccggctgaaacttcacattgaagaccaagtggatagagatgcaattcctattccacttaaatccactaatgattaaaaagcatgatgcgtctagctaagatgctaaacaagcaacttttgatgtaaatacatctttttaagttttgtttttcttgtgataacaatagatttataattatgcatgtttaatttctaggcatttaggttcatgcatttttaagttaataaaagcaattaaaaataaataaaaaggttgttcaagaatgtggcgctaattgcgccaagtgtggcgccactcgcgtaagagacacggccaattcacgctgaccgcgtggacactcgcgcggatcgcgccacccattcgaccctgaggctcttatctgcatgatctggcactgatcgcgccaagtgtggcactaaccgcgccaagccacggtcatttcatgctactcgcgtgaacctcagcgccaaccacgccaagttttcgaattgaaagctctttcagtgcctattggagcgggtcgcgccggacaccgcgctaaccgcgcgggattgggaaaattgtttttaaagttgaattaactggatgttcaagtagatttaaattgagcctatacatgcaaggacccaaatctgggaatcattaaggttgttctcatgatataaatcaaattacttttaattcccgtgcatgtttggagtgaaattttaacttgcaaatgattgaaatatgaattgctgaagcaatggttaatgttagggttatgcttgcatgaaatatgtgaactctgaattctggtggaggtaaggaccttaaatcttggaatctaggtgagattattcaattctctgtcatgattgcatagtgtgtactgccactagtgaatttgaagtgtgtctgcataagatgttgcattatatctggtttagcacatctaatgaattaaatatgggaattgttgtcaggcacatccatggataataatgatttttgtggttctttgtattgatttgattatttcaatttgtaatatgcttgagaacttaaatctgggaatccacattgttaagccttgcagaatgataattgctctttgatacttgaagcttggcttgcattttttatctgcatttacaggtgtctgagacctgtttggggttgtggtgtaattgattgtaaacattgtaatttgtgaccccaaagtggacaacaaacagctggtgatgtaaaattttgtaatgagataaatctgggaatcataggaacactgcgaaattctgagcagtttgaattcccagatacgtgtaaacaaacttgcttgctgtgttaaaaactgtgctgtttattttgaatactaatcactaatgcacagtctagctgaatctgaaccaatgaaaggaataaatctgggaattcagccactgcatcaggtatatatatgttttctgttctgagttcagggtccacagagtgagacagacaagaaggaaagtgcagctgcacctggcaacaaattgatagaacaggaccatttattttgttttaattttactgtttttatttttaattttcagtatgcttttagtttagttgttttgttagttagctgttttacataagttctgtttggattaatgttcattctagttgtgattctcaaataatgcatacatgattgagtatttagcagcacataatcattttcaattattgttggggacaacaattttctaaatctgggaatgggtgcatatgcattatttgctgaatcacattcaagaaaacaaaagatgtccaacagaaaattttttttttagttttatcttaaatttttagctgaagatttcaataaaagttggcagcacatcagatttttttcagactaaaagtgaatggacatagtaattgataggaattctttgatgaaagcttgtgtgaaatgaaatatagcatgaattgcatgatacatgaatgaatattgattgttggtatatgatatgcatgttgaagttgaaatgttgcttgaaatgaagtcagcagtgattgacttgagtttagcacttgtgagattttgagccaaacagtaattatttttctttcggagagactccattttcactgtactctagaacttgaattgtttctctggatgcaggtgtgacttgacatgtttaaggcaattttttcttctgaaaaccagggccaaattgacttacctccaattatttttccatttgcacctaattttgagctttagcctttcatttctattacccaaatcagagccatatccagtgaccaatctccctgaggctagagaaggtacaatacaagtctatgacagcaaaaaaacagtgaagtgttcatcaaggcaagaaggaaaacaagtgaattcaattggtgtgaaagaacaagaataaacaagcacaggccagttgaaaaaaataataagcctgagattatcagctgaaaatctgaaagttgttgtattttgaaagaaaaagaaaagaaaatcaaaaataaagtttattgtttttttttatttagaataatgtgttgaataaagtaccagattttgaagaaaatagacaaggaagatggaagaccacaggattggacttaagggactggatctagcctcatcttagctacttttccaaagattttcctacccttagcccagccaagttacaagcctaaaagaccttttgatcaaattatgcttgcatctgttgagaatattttcaagcttatggtagtgctgtgactatgttgagtgagaaattgatcagcctgatacacttgagtgcatgagtgaataaacacatttttgtgaggaatactcaagttaactctcactaattgacagatttgaaagtaccatagaagctttgatgtaaattgattatactcagcatgatgactctaggattgtagattgtggtttagcttgattgttaatccttgctcttatcttagagttatgtctgttgctgaggacaacaattaataaatctgggaattgtttgatgtgttgcaaacacatcttagttttaggttataaattagataaataagttaggaattagaataaaattagctaagtttattattatatttaatttaatctcatatcattaccatttgtgcattttagggcttaaaagaggagaaacaaggcaagaaaagaagaaaagcaagtatgaagtcccgcgcggatcacgccagatcccgcgcgggccgcaccatagtccaaaatcagagtccaagctcgaagactccacgcggtcagcgtgagaaccgcgccatccgcgccatctagtcgaagctccagcgcgatgcgcgccacaaggcttggaagcagttttagttcgtccaaaccgcgtgattagcgtgggatcccgcaccatcagcgccacgaaatcgctgttgcctgattttgcaagatttgattcgaaattggcttaggagacaggcctagttactctaattaaatctatctataaataaaggcctttggggactgaacaagacaacaatatataccttttaacacctctccacacttccacacatcattctaaacccttggaagacaagaatcaaggctaggtcactgcagaatgttttatttgacagcttttggtttcatgaagcctatggcaggctgaacttgtattgtgggaaggccatgaactaatgagaactcctctgtaacttgactggtattgaacaataaatgttgttttgattattttattctattctgtttttattgtttattcttatttggaattggccattctatctaagtattgagggttaggattcgcaatggggacgttgggattctaatttctgacctgtttagaataacagttgttcatcacctagggatagggatgcatgactgcagactttataatatggtcttttgaatacttaaactgatagacttcactaaggaattatgttttcgattcaggttaaagggttaattcactaaggtattaaggattaactaaattaggaaagatttatcctctgagcaatcatataagaacacttatgatttattctctaaatgcttaatttgacaatatcgctaagggcttaggattctcgatcgaattaaagggttaagccgctagttatctaggatttacgaatctaggagagatttattatttgtgtaacttaaattgataaaccagtcaagtgaaagaagtatgaatcaaaggggattgtgcctgaccacaattgtgtcttccattggtaacatttttactattttactgcacttatttaatttctgtttattattcaaacaccaattactccaaacaattcttctttattttctgttttattttcaatcacttaaaattataattactgtgaatttcaccccaatccctgtggagaacgatactctacttacccacttttattacttgaaaaagatcggtgcacttgccgtagtgtgcgtttttcgcaacacagccacattagccgaattttccagtgatgtaaaggttttttggctcacacaacacaaccgcaacggcaattcaaaaccatgctatgcatgagctaaataaattaacttattggagaagttaattaatctttcgttcttattttcttctcctaaaaaaagtacttatagagaaaaagtttatccaaaaatagacatatatatcaacatttcattagtaaaaatcaaaaacacccaaagaaagagaccaaactgaaaggaaaaaaaaaaggttttaaagatagaattttgacctcaagagctcctcgaaatctcttgtacttcctcaactctttaacgactcttgaaagctccgccttgtgaggtgcctcccttcgtcctcccattggttgagcacctctacggaccccacttggggttttggtggagagatatcctgcggtagacgtcattccaacgcacgatggggcgacgctcacagtcgacggtgccgtagctgtggatgttggagatgcagcacgtgagcactgagatgttgggaaaaaaaataccaatttccccttccaggacctgttatgaatggtcctgcacaagcaaaatactttatgcacaaacaataattatacaaacaacacaacatcatttttaacgtggaaaaccttctcaatgtgagaaataaaaaccacgggaccgatctcgaagtccactcaaattcttcattatcaataaagtgagattacaaaatggttccaacaaccattacaattgtaataccctgagatttaagcatgtaattaaccctgggtttaaggctataatcatgtgctaattatccaaaagggcgcatttagcagaaaaccctgtcaggggtgcggcgctgatggcgccaggtctggcgctgagggtgccagagcactggagtgtggcgccaagagcgccaggtccacgctgagggtgccacggtctctgggttgtggcgccaggagcgccaaaggtggcgcctggggcgccaagtttcccaggtggtgcggagagcgccagatgcagcgccggtggcgccagggtttctggaaggtggcgccaggggcgccaggtgtggcgccaggtttccagctggagcgaatggcgccagatgcggtgtggatcgcgccagaggttctggaacgtggcgctaggagcgccagatacggcgctgatggcaccggagtttctggagcacggcgctgggagcgccgcgggtcgggctgagtgactatttaaagcccaaaacgcgaaaattgaaggggaaaaggtcttcttcttcttccttctgccctaaactccattgttgaccatcccaagcttccttgagccatatttcttgatcaaaacacttccctttggctcttgattgtgagagaaacactatggaagcttgaatcactcatcctttctcttgagaaaccccttttggtgagttttgaaatccccaagagaaagcttagagaacttgagtgtggctgagacccattgcgtggaaaggacaccggagctcgaggaggtggtcctagggtcgtcttggatgccgttgaggtaaggaactcaagtttctccgtttgattttgagattgagggtttgcatgaatagtaacccatatgtgatggggttggaattagcccaaagtcctgtagagacttgtgttcagggggttgttgtgatgatgttagagccttcagaaatcattattgatgaagtttgattttggctctgagacatgcatgtatagagaaaggggctgagtgcatggttatgttgaaccctagagtagatgatgaagtactcttaagatgttttagatgttgtccatgagctgattttgggttgtatgattgagcttggacatggtagggctaaggcatgttataactctgcctgtggcgcggttggcgccaagttccgcgcgggtagcgccgggaccatttgtgagaaaaccctgtggagggagcggctcgggtcgcgccagggttggcgctggtcgcgccagaccacactggaaagtggcgctggaggcgccaggccggcgctggtagcgctagggtctcgaaaggttcacgcttggagcgtcgttggtggcgccaggggcgccaagaatcccagttggcgcggttggcgcggggtttggcgcggatggcgccagaggttctggagtctggcgccagtagcgcgggagtggcgctggtagcgccgcagccaccgacatgctggcgcgagtcgcgccgggtctggcgcagatcgcgccagacctcgggcaagcccagtatataaaggggaatcgcgttttctgaggagaaaacctctcctccttcttccccacgaccccagcagccattgttggccttcccaagctttctaggaccctatatcttggcataaacaccttccaatagcctttgatcttgagagaaacctatgagagcttgaatccttcatcctttttctttaaaaattccgttgtgagcaaatcccttttcctcagagaaacctcaaaaatcaagcgattggcgaggacccaaggccgggggaaggactctggagctcgaggaagctgtcctgcaaccttcggggtcgccactgaggtaagaaacgtgtgtttctgcgaatgatttgggatttggaatttcctgtgaatagtgacccatttgttatagggttagaattagctctgggtccagttgagagaagtgtttagaatgatgtatggatgaaggattagctttcaatttgtgatttggggaacgttggttctggctctaggatatgcatgtgtgacttggactgagtcacttgacttgtgacatgcaagagccttggtgaggggcttgtggtgcctatgaggcccaaggaacggtgtctagtaggaaagaccgttcaagccctgggaaatcctgaggttttgggttatgtgagctcaaagctcatgaagaatggcgaaggctgagtctatggtgactctgaggccatatgtgtttggaatagacaactgagggtctgtgaagaggcttgtagagaaagaagcctgaggaaccttaggctgaggacctaggttagtggagaggattgtgattcctttccctgaggcaggagtgactgcctgatgagcttaatggttgatgatatgtttgaatggtctgtaatgtgctgttgtgtgccttgtcaggacttgacactttgagtgtcaatgaagcagaccatcaatcaaggagcagagctgtgaggcacggataagaggtaagttcatagttctggggattcgtccctttatcttgtttgccaccctggtgggtgaagaaatgcatgccacgcttgtgttgatataagtatatatatagatatatgtgtgtgggcatgctgtgtggatttaatggccaatgtggcctatctgttttattgtgtttgagcagacaccaatatggtgtcatgatatgatatatgaaaccccaggttagacactgagagtgtgaggggaatctacacctgtgtgataggtgtgagaggccttggggcctggatggatgaacactgtgtggtgttcgatgtttggatgagagctgcagatcagggaaaagatctgtgatggaacctatagggtaccgcgatggtatcgggctagctgaggttccctagccaaaggaagagtttgaggactccctggaatagctgagattccttgggaggtgccactgctctccaataaagtcctaaggatggtttactttacatggatgttcctccttaggcagagatgatgagagtcctgagtgattatccttaggcgtttgtgttgagattgataaagaccatagtggtggtctgtgtttgaggagagagagacactgtgattgtgtctaagttctgagattctctggccagtagaatagagttctatagtgataggacagcggatatgtgattggaagtcctaagagatagagtgcctcctgtgtgagatgatctctcttaggcatgtggttgaggacctgagggatagagtgcctcctgtgtgagatgatctctctcaggtagtggtttaacagtctgagggatggagtgcctccctgtgtgagatgatctctctcagaccatgattagaagtcctgagggtagagtgcctccctgtgtgagatgatctctctcaggtagtggatctggaagccctgaaagatgagtgcctcccggtgtgagatgatctctttcaggcatatgttgtaggcagatctggggaacggtgttacctatgtggataattccccaggcatgttgaaaagaagtcctgagtcgagaggattttcaggcagtatgtataaagacctaagtaagtgattcaggcaatgtttaagttgttatgagacggtgcccctatggtatatgtagtgtccagtggattgacactgatgattaggtacctctgtgagacctctgtgagacgtttgaaagagacagtatagtatgtgaataccatgataatggcatggctctgtgagataattctggtatggcttgagagcctatatgagatagaatacctctgatgctgagagcatcggatgatgtcccaggtagttgggattgtgtgaaagctaggctgtggcctaggtgctatgtgtatgagctgggataatatccttagctctgttatatatttgtgtgtgtgcttggaggtaaaccagggtaagggaggatctcccagacctgagcttactgagacgtatgtctaaccctgtgtgggttttgtggttttcaggtgcacttcgggagcagagaagcgactttagggcaagagaccctagtggatctgataggctggagagtgggctgcagtagaagaccagagttgagcttcaggactcgaagcctgtcttagtctccctgtatagttgtaggggtgtgtacacccgcttgtactgtacatatttgttgtaagaccagtatgatctagttgtcgaatatgtatatgtatagaggtttatcaacagggttgtcaaagggattaaattcagggtaagcttatttggcaagaggcttatcagaacaaaaatgccttaatcatatccaaacatgcatgagaaccaagaaatatcaaacagagtcaagacaaggcaactgtgcaagcaatcaagaggtatagcacacatgaaagaacagatagtggctcaaatcctcacacagggtatatctgtcacatttaaatcaacctttcaaacttcataatcatctttccaagtaaagaaaaacatggatttcaaaccatacagtatgaagcaactcttatctaagcagaagtaggtgtcaacacttattcaaaacccagaaataaaaaagaaacatgcaaaactatacacaggataacaaaacaaacaaaaagaaaacaacaaaaacaaaacaaaaagaaacagtctctcccccccccccacacttaaaattacacattgtcctcaatgtggcacaacaaaagttcagatggacaagtgcgataaaataaaggaggagaaagaaaaagaaaactccctaaagtgtagtggaagatggaagggagtcaggtttaagcagagatatctcctccactactgcatccagcaaggaaggattgctgaggaatggtttgagacagtgtccattgatcttgaagctctttcctgtggactcacttttgatttcaactgtaccataaggataaacattagtaacaacaaaaggtccaatccactttgaccgtaacttaccacccatgagtctgagcctagaattgtacaggagaactttctggccaacctcgaagtctttcctaactatcaggctatcatggaacttcttggtcttctctttgtagaactttgagttctcataagcttgaaggcggatctcatctaattcacttaattgcaacttcctttcctcaccagcttgatccatggaaaagttgcaagtcttcacagcccaataggctcgatgctcaatctcaacaggcagatgacatgccttaccaaagacaactcgataaggagacattcctatgggtgctttgtaggcagtcctatgagcccaaagagcatcgtccaatcttatactccaatcctttctgttgggctggaaaactttctctaagatcctcttgatttctctgtttgaaatttcagcttgcccattagtttggggatggtatggtgtagagattcgatgcacaaccacatatttcttgagcaaagcttgcatggatctgttgcaaaaatgggttccttgatcactaatgatggctctgggtattccaaacctgcaaaatatgttagatcgaacaaaatctaccacaacccgagcgtcattagtcctagtagctctggcttctacccattttgaaacataatcaacagctaacagaatatatgagaaaccaaaagaagcaggaaaaggacccatgaaatcaataccccagacatcaaacacctcacagaatagcatgggttgttgaggcatctgttgtctccatgtaagggatcctcctgctctctgacactgctcacaagtgctacaggtctttgccgcatctttgaagatggtggaccagtataaaccacaatcaagaaccttgcgaactgtcctctgtataccgagatggccacctagtgcggaggaatgacaaaactgcaagaccgaattaatctcatgatctggtatgcatcttctaatcacctggtcactgcacaacttccacaaataggggtcatcccaaatataatgcttagcatcactctttaatttatcaatttgagctcgtgatgccaagggaggaaaaacagaagcaactaagtaattcacaatattagcaaaccagggggtggaatttgaaacagaaacagaagaaacagtcaaaagattttcatcaggaaaattatcctggataggcaacacctcatcattattctcagctccttcaattctgctgagatggtctgctaccaaattttgagctccactccgatcacggatatccaaatcaaattcttggagcaagagcatccatctaatcagtctaggcttggagtcagtctttttcaacaggtactttagagctgcatggtcagtataaacaataacaggaaaaccaagcaaatatgatctaaatttatcaagagcaaacacaatggcaagaagctctttctcagttgtggtgtagtttgcttgggcagcatccaaagtcctggaagcataatatatcactctaggcagcttatcaactctctgtgccaggacagctcccaatgcataatttgatgcatcactcattaattcaaacgagactgtccagtcaggtgcctggaggataggagtagtggtcaatgcttccttaaggtgatcgaaagccttcttacaactatcatcaaaattgaaatccacatctttttgcagcagattggatagcagaagggcctttttactgaaatctctgataaagcgcctgtagaaacctgcatggccaagaaaagaatgaacctctcgctcgcaagaggggtaaggcagatgtgaaataacagatacttttgcaagatctacctctatgcctttactagaaatgacatgtcctaaaactattccttgttctaccatgaaatggcatttctcaaaattcaagacaaggttagtttcaatgcatctattcagcactttatccagactgtctaaacacatgtcaaaagaagatccatatacagtaaaattgtccataaacacctctatgcaattttcaaggaaatcagagaatatgctaagcatgcaccgctggaaggtaccaggggcattacataggccaaaaggcatcctcctataggcaaaagtgccaaaggggcaggtgaatgtggtcttctcctgatcctcaggagcaatatggatttgaaaataaccagaaaaaccatcaaggaaacagtagtgagatttacctgccagacgctcaagcatctggtcaatgaatggcagcggaaaatgatctttccgtgttgcttggttcagccttcggtaatcaatgcagaccctccaactgttttgcactctggttgggataagctcatccctgtcattctttacaacagtgaggcctgtcttctttggaactacctggactggactcacccactgactgtcagagataggataaatgatcccagcctgaagaagcttggtcacctccttctttactacatccaaaatcaccgggttgagtctccttcgcggttgtctcacgggtttagctccatcctccaatgatattctatgcatgcaagtggatgggctaataccagatatgtctgccagggtccagccgatggctttcttatgctttttcagaacttgcaacagcttgtcctcttgatcaaaatcaagggaagtagaaatgatcactggcaatctctcatcactctccaagtaggcatacttgaggtttttcggtaaaggttttaattctggaatgggggcaggctgatcagaagaaggaaccaaagatggaagaagaatgggttccacagcctgtacctcaacctgcaagtcagattcttgtgtactccctgaaacatggttagtgtattctgactctaaagaatttatatgcagaggtacaacacccaatacatcagaattaatctcagaactaacatcagaattaatttcaggctgaaaatcaaagatggattcattgtcagattcatattcatccatgcatgcaagagaagtataaagatcagatagaaaacattgttttgtatcatggagagaataaaaatcagaaacatactcatcaacaacatcatcaagaatctcagcacggaaaacagaatgattttcagatggatgtttcatggcatcaagaatgttaaagtgaacaacaatatcaccaaactccatagtcaatgtaccagcatacacatcaatcttagttcgggctgttttcataaatggtctgcctaaaatgagggggacagaaccagaactatgggagaatccctcctccatatcaagcacatagaaatcagcaggaaaaatcaattcaccaaccctaactaagacatcctcaatgaaacctgtagggtaggcaacactcctatttgccaactgtatcactacaccagtaggttgcaagggaccaagagacatagatttaaaaatggacagaggcataacatttatggaggcacctaaatcaagcattgctttgtcaaatatattattaccaataatacagggtatgctaaaagtacctgggtcctcacatttttcaggcatgtttggaacagaattacctgtcatagaagatacatttctacccatgctgactctctcaattccagtcattttcctcttcctcttattagtgcacagctccttcaagaattttgcatatttcggaatgtgcttgatggcatcgagcagaggtatgttgacctctactttgttgaagatctccaatatttccttatccatctcttccatctttttgtttggaatcgatctaggaggaaatggaagagggatgggaggctgctgctgcacatcagaactagtgctagaagaagatccacctgcacgaatttgttcatcactttgctcatgtattggtacaggtgcaggggtaggaactggtatagatggaggtggggacactgcagcagtaggtatatcaatctgttttcccgacctcaatgtgatagcactaacatttttcggattctgcacagcctgagagggaagtctatctgaattttgtgactgtgcttgattaagttgagtagccatctgccccatctggttagtcagactctggatggaagctctggtctcttgctggaattgtaaattttgaagggtcatctgtctcacaagctcctccaatgaaggttcagaagtagaaggttgaggtgctggtggtacaggtacatcttgttgttgcctctggtactgctgctggactggtggaggtacataaggtctggttggagcagcagaaccttgaaatggtggtagtggaggctgttgctgttgctggttgtttgaccatctgagatttggatgatttctccaccctggattatacctgttactggacagatcataattctgctgctgttgttgttgaggcctattgttataaatgtttgcagcataggcttgaggagcatcagggccaacaggttgctgcagagagggacatgcatcaatatagtgatcattggaagtgcagacaccacaaactctggcaacagaggcagacttttggttaacagcaagctgagtcactaaattaaccaaagcatctaatttgccctctaatttcgtagctgcagatgaagaagaattattagcagctacatcatgaacaccacgaatcacaatagcatcatttcttgcactaaactgctgggagttagaagccatcttttctatcaagtgcctagcttctgcaggagtcatatcaccaagtgctccaccactggcagcatcaatcatactcctctccatgctgttaagtccttcataaaaatattggagaaggagctgctcagaaatctgatggtgtggacagcttgcacacaactttttaaatctctcccagtatacaagctttctccaccaagctgcttgatcccagaaatatccttcctgatggcagtggtcctagatgcagggaaaaatttctccagaaacaatttcttaaggtcatcccaaccagtgatggacctgggagctaggtagtacagccaatcctttgccactccctctaatgaatgtgggaatgcctttaagaatatgtgatcttcagggacatctggaggtttcattgtggaatagactatatggaattccttcagatgcttgtgtggacattctcctgcatgaccatgaaacttaggcagcaaatgaattagtccagttttgagaacatatggaacatcctcatcaggatactgaatgcataagctttcataagtaaaatcaggtgcagccagttccctaagagttctctcacgaggtggaggttgagccatattattctcagtattaaaataatcagcagaatcggaatcagaaatattatgcacagaatgctcagaaacagaatgctcagagtgcaaactaatattatctaatggtacagaatctaatgaaaattgcctagaatgcctaattaatctatggtaggtcctatctatctcaggatcaaagggttgaaagtctcctggattacctctagtcatgcactatatgcaacataacaagcatttggcagacaagcacaaagaggggtaaaactagagctatactcaaacgaagtccaaatgaactaaattttgtgagcaacaccctaaaatcatgaaaagatagcacaccaaatttcaaaacctaattcaaaggataactaaataaaaaagattaagaaaatatagaaaaataggaaaataaaacttaaaaaataaaaataaaatagaaaacggcctatttttgaaaatccaacggtggccagcaggcgacgcttgctgggttggctagatcttttttttctaccccaaaagcatatataattaaaacagaattcacaattaaattgcagtgattaaaaaaacaagtcaaacccttagaacagattgcgcctctaatatccttggttcacgaaagataatctgtcctgcttaattctcatcagtccagattaatcaactaagcgaagattaatctaaaacgtcattacacgaattaagcaaacgtaaacctcgttaaggcaagctctcaaaattaagcaagctgagatttctgaatcattcaattcagaatcattaagcatgattcaaactcgaaaaacgcagaaaacgaattgcaaatacaaggaacctccagtaaaggaacctccattaattcgaaattaacaacagaaacgtaatttgaaacgaagttgaacattaaactgtaacagaaacgaaattaaacagaaacgaaaaacctaaagctaaaatgaaatagcagaaacagagaccaaaaacgaaattaaaagatgaagatgaagcagacagaaacaaaaataaaactgaattgaaacgcgaatgtattcagaaaatagaaaacgaaaacagaacagaggaagcagaaaacgaaattattctaaaaaaccctaaaaacgaaatagtgttggctgctaaagaaaacagaacgaaaattgtattgtaggttggttatctctgtatgggcacagttcccaaatatatagagtgactaacctagacgaaaaatgggcttttcctaacagttttggcccaaaaatgaaaaataaaaataaaaggaaataaaatgctctgaaaataatgctgacgcgacatcccaatcttcaagtccatgaattaatttcaagcccaattaattattaatctgccctgaaaatcaaattagaataattaaacttaaaataatccaaattaattaaaatctgaattatcggtccaattaaatcctaaatgagaaacaatgcaaaatataaacaattaagcacaagttagggattaaaatgagtacagaaagatgagtaaatagtgataaatagtgactcatcagtgttacctatgtggataattcccaggcatgttgaaaagaagtcctgagtcgagaggattttcaagcagtatgtataaagacctgagtaagtgattcaggcaatgtttaagttgttatgagacggtgccctatggtatat

SEQ ID NO: 40 - DNA, 750092 bp, Glycine tomentella
agagatgccacagaggatttcaatcctgataacaagattggagaagatggttttggtcctgtctactaggtattagagtgaacggccttttttcttccaagcataaaaatgatgttcctccctagcatttaaaattctaaacaactgttggattgcagggtcaattatctgatggtacaggtagcagtcgagtaacactcatcaaagtcacggcaggaaaccatgaatttttgaatgagataggcaagatatcttgtttgcaacaccctaatcttgtgaaacttcatggattttgcatcgaaggggatcaattgatattggcgtatgagtacatggaaaataatatcctggccagtgctttattcagtgagtttctacccagagtgcaaactattatgtttgtcttttgccttgtcatttattatatattttgtaagataaggtgccaagtgttaattatgataaatcacttggagatctgattaatctgaagaagtttgtttcccgcccttttccatttttctggatacaaaataaggaatgaatgagtgctatagctagttgtttttccttccctttgtctagacaaattaataccctgtgcttagattttatgctgttaaacttttcctttttcccatttctatcactttagcagctaggcaatagaattttgcaaccgtgattcatattaattcaaccataacttctttctgcatcttttataggctcaaaagatcaactgaaacttgattgggcaacaaggcttaggatctgtattagcatagcaaaagttcttgcatttctacacgaagaatcaagactcaagattgttcatcgagatatcgaagctactaaggtgttactggatgggaatttaaaccctaaaattaacagattagtagctttggatatcaaagctactaatctgttaattttgttttacagagggtatatggcaccagaatatgcttatggggttacttgtcttacaaggctgatgtttacagttgtggggttgaggtcttggaatttgttagtgggaagaactataagaattttataccaagtgataattgtgtttgccttttagacaaggtattctactatgcttcaatccctgatacatttttggcattatgaatcccttttgttttggtagttatccaatgcaaatatccatattttcaccattctaaagaaaggtaacaaaatttccattgcaggcatttcatctgcagcgtgcagaaaatttaatagagctggttgatgaaaggttgcgaacagaggtaaacccaactgaagcaatagctttgatgaaagtagctctcctatgcaccgctgtaacaccttcacataggcctacaatgtctgaggttgtgaacatgcttgaaggaagaatcagcattccaaatgctatccaacaaccaagtgattttagtgaagatttaaggtttaaagccatgagggacattcatcaacaaagggaaaatcacagtttgagtacaagccgaacaaacaatataacagaagtccttacacttagctctccctaaacatttggcaatgacctggtgttagttcatgatttcattgttgctgaccatattgcaacatgagatatccttagagcatagctgagatttaatcttttgggataaccaactgtaatgatcaccatttttaggatataacatttttcactccgtctttcagagaatatatttatttctagatccgtgtaaatttctaattgctcttgaagggtactttttttaacctgggtatttcattttgagatattattgtatggttcggtgcagtcccagttaatcttcatatgacacaatcacaagttttcaatttatgaaaacaaaattggcgtgtcatgtggagattgcttgaactaaaatgatctcggaccatataataatttctcatttaagaggtgcatatgaactccttttcactggatatacacaatatttggaggaagaatgtacatacgcacccttgaacttgggtgttatagcaaatagcaacttggagaaagaatgtacatacgcgtcttattaatctttgcgcgactgaaaacctgtttgttatatcttgctcaacttaagaacggcacattgagtttctcctttttatcaggtgtgtggtgtgtgggttcactgggttggggagttagtgagaattacaagttcagtgttatgctccgtatgacaatttttagggtaaaaagtaataatgggtgaagtaatacacctacgtagtgaagaagtgtttctaaggaataagaaatcaagtttcaacgctgccagccatcacagttatgagaaaagaaaacttcgagcttgttcagattaatttgtaaactaagccaccttccccctctttgacaatgatttagttaagactgatgtgtctaaaaaataacttcagtaaattttaaatctctttattttgaatattctactttggaaaaaaaattattattataaatttttattctcaaattaattccatctttgattctaatccattataaaggtgctgcaaacatgagcataatcaggtattaaaggtttaggaagagatgcaacacaagcaaaaatgaaaataaccatcataagttgataaaaagaaaccaaacatacttcaagaaaatataactaaaaagacaaattaaactactaatgtgcattccctaatgatcagcttggggcgtaggacgggataatatagagaataggtaacattcatgaacactttcaataatcactgtgggttccaattcggtcaattatgttagcaacagtttccttgctctcccttaggactttgacactcctctgcagcttttcacgctttccagaaattgaaggtgactcctccaacaacctctcaatcccaccaccactaggggatagcagatcatgaacaatctccttttccaaatccttgttaacaagattgttaatactcagcataagatgtaaggcaattgtgtcaatcaatcttttttgcactatcttccagtacgaaatcatcctcaccttcaaatcaaatgcttgagtaagcacagatgggtattgcctcaagtgaccaacttcaattttgcccacaccttcaagattcacatgcgatggattatgcggattgttcaaaacttcattcagaaaagtatcttgctgagatattaacttgttgtattcctgcacaaactccggattacaagtgtaatcagtatacatctccatttcaatggcctctattacatgattggtggaacttctctttttcttagaaataagaacctggcttgctcgcctggtagacatcaaaagctgatagtagttttcagaatgacgcgtgataactgaaaccagcacatcttcgagatagttccacacattttcaacaaaacctataggcttgttggcaatccctttcaccttcccttgcaatatagaaagaaaagcagtgcgaggcatgaaatttggaagaccaatccactttgcctcctccagcacctttatctcttgcataagaaaattcttgcttgcatcactttcagcacaatggtaaagatcattcgagtaggaatcaagcatctccaccaaccgggcagtacaatgcatgtttttgtcctccaggtactcatcaaattctcctctaagcaaaatttttctgagagattccttagtcaatccaataatatgcataaaagctgtcatggcatcagctactgaagccaagtttgttggcaacttttccaactcagacaaattgttagctagcttctcattgatttttttactatttctggcaaagttttagatatgctcatagcctgaacctgaaccagtttctgtgctagaactggaacacccacgatagacttgtctattttggaaagaagtggatggaactcaaacagtttctgttcttccactctagcatcctcatatgactcatcaccaatgcggtttctcacacaaacataaccaagaccaatgttcacatcatcggcagtaactttttctaacaagccctcaggagacttgtctgcctttgtgaccacagccagtgtcctgaggccagtttggtcaacactctgagacattctaatagactcacaagtagtgaaatcaacactagcagaaagaacattcaggataatactttcttctggcttaatgtactccatgatcatgtctttaatctggtcataaatgttctcaggttgaccatgaactggaacccgagttataccaggaagatcaaccattgtgagatcaggaacaccattcttcttcaccagcaaagtcaaagggttgttggaaatccctttaccatggcctgcaagctcttctgtggcagcatttatggcatgagaaacatttgcttcatcagtggaaacgattttgccattgaactccaagataagctctggggttggaagagggtggttttggagcctcatgaccaagggcaccctagtgcaaatgccttggccacgtggcaagctgataccagcaagagattcaagaacacttgatttgccagatgattgatcaccaacaacaacaatggaaggaagctgaattccctcctttgtaatgttaaggcgcctgagattttccatagcatcaagaactggacgtatcctctcattgtaagaggacacaattggtgcaacaatagcaagaggctgaggctgttctgcagatgggtcagtttcacattgagaaacagatagtgcaacaatagccttagtgctaggtctccttcctccagccattttcaatcacaatcacaatggtaaaaaatatagagagagagtgagagagggatagtttggtatgcttattcttattatgagtgagtgagtaaaaagccagagcttaaatgcatatttatagattaaaaaaaaaaaaaaaaaaaacttagaggaaaatgaaaggaaaggacagtttggtttggtatcttgaaagttgaaaacaagcgtgaattgagcttttcatgggaaccgcagttacagagctgttggggtcttccatgtttaggtaattgaaaggtttctcgttaaatgcatgcatggtagtaattgaattgccgtaaatattagtaacgaaaatttcttacattaattaattcaactcaagtagttttagtaaaaccaaacctgaaggggaatatgtaccaaaaaagaaaaaaactgaagggaatgtagttaaggaaaagggacaattcattttataattcatctgaggaagctataaagttttatttatgagtagttattactattgataacatgcttcggcagtatgtcctctctagtctctcacatactatggcatatgtatggtcgtgacctgtgacctgtgacctgtgacctgtgagaaaatctttgggtattgcttttgttgtcttaaaataaataaaaaattaatggtgctatttaattagtatggaaaatggtgaatatatactttgtttctttatgtatttttttgtgtgagggatttttgtttatttttggatgtatgacaggaaaaggaagggataaagagagaaaatactaatagatgataaaagatgcgatggaaaataaataagttttcatcattgataaaaaaaatactattacaatttaataataatataaagttctcttagtatttggaattttagacttaagatagaaaaaataatttgtttcattttttttatttttaaagaatttaaaatatttaatataaactctaacgaaataaattatagaggtttagagtaattctattctctataattatgaaattatgagccagctattttaggagaagaatttttatttttatgacttttagttttcgattaaatcctagtaaaactaaaagtttatagtcctgcattagttattcttctaaaatagtattttcgtttacaaacaaaagggtgaaaaaaataaaaatgaggaaaatacaattccatacaataaaatcatattttttttattttttttttatcattgggtgtttctgttacgtaaatggaagtaaaaaaaataaaacacaattttattatgcaagtgtgcatgagaatcatatttttgttgtgcttttttttttatccgatttacataattgaaacacatttttgtttgttgtgtttccattcaagaggcaatttggaaatacagctaaaaggcccccacttcgctagtgccaataggcaatactctgtagaatatgcaaaggcccatgattttcattcttctactgggccaacacaaacagcctcgggaccatcaattttatatgttcgagttaaggcatgtgcttcatacaccatttcattttcttatacaccatttgtttttttcgtaatacccaaaatgccctcctagtaaatggaaaataatatataaaggttaagcaaaaacgaccgagagagagagctgggagcagctgccgttcatgtttgcaatccattgtttgaggctttgagcttgtggcattgcttggaatcgccattggtgaggtcgttggaggtgtgcgagctgcagttcgaggtttggtgtcgccggagaggaagagcggaggttggggctgaggtaagctgtattttctaacgtacggattcggtaatccgcaattcaatggtgcatgcatttacggattaggcaatccgtatggtctaaacggattactcaatccgtatggactatacggattatacaatccgtatagctcatatggattgcctaatccgtatgatttgcacggattaagcaatccgtatgatctttacggattgtgtaatccgtatagtccatacggattgagtaatccgtttagaccatacggattgcctaatccgtaaaggtcatacggattgcgtaatccgtgtggatttgaaccatttaaaaaaatattaaaaaatggaatttattgtgaaaaaaataattttaaatattagtaatgccattttaatataaaaagtaattcatacaaaatagatcaggacaaaacatcagaaacatgataaccaacaatagctaaaaaactggagatagggatgacatgacgttgtaacaataacaattgtcaagtgcgaaataagcaaagtaatcatcgttgattggttatttaggtttcctgggtgactgggttgttgaaaatagctaggatttgtattggaccaaaacgtttccagtagttggattccgctaagacctttaacacatcttcatcggttatcaactcttttatgtcatattggattgtgttgtctgaatacgcgtagtgggatggttgtcgaaaaaataattttcttaccacctgtgagttgtgtattccataagggggaaccccaacaggtgcaacttgcttgatgacatccttgagtgtttgaatgttgcatcctgagggtatttgaaacatttttggatttgttccattgaacgaataacccacaccgtaaccgctctgtcgtgttctattccatttgccgttgtaatatagcattgcatcatgtgttcggccaattgtagattgaagtaagtttagtataccgtcggctgttctgttgattgtacaacatatttctataggaccaatagttgacatgttctcactagccattaacattgtgcaaacatcatcatcatttgttagttgtagagaatggaaaaaaatttcctgacctgcatttatagatggttgccgatagtacatttcatcaacaaattggtcatgggttagtacaagtgtgttgtgaatcctggtcttcagtgcctgagaagaacattcatcaggaactcgcattggcactggagtagaacattgaaaagaaacaccagtttcgtcgtgtatgattgatccatttggaaaaatgaatgctaatttggagttagcaatggtttgagtgctggtttctcctaagaatgccatagttatgggtgattttattttgcagatgtatgttatgtgggagaatgaccaaacaagtagggtgtccgtgttatttatagtagggtatgtgaaatttgaccgttgcacatggtgtgtcaggcatgtgtcatttgaccgttgcacatggtgtgtcaggcatgtgtcatttgaccgttgcacatgatgtgtcgagcatgtgttgtgtgcagttttttgtccagcagtgttgtctatgtcgttatgtcattttaccgttgcacaagctttttgattaactgtttaatgaatatgatttttgtgtgtggttttaacatgattaactgtaattatttaccgtgtatgtgtgtgttttgttagaatggacgacgatgagtggatgtatgagagtatcatggctgaagatatttacatgaatgaagacattgcaccagaccctaatgactttgaccacaaagactgttttatagattgttcggcagcgttccaaacaaatgaggtgagagtgtggatgacttataatttagtaatatgaatgtagtttaagtcgttaaacgattatatttgaaactttaaatatcaattatccttttgtgtaggtgtttgaatcgcgtgatgcggtattgaggtgggcccgtactgttgcgtctgagaatggatttgtggcggttatcatgagaagtgacaccaagaccggtaaaataggaagaacgtcatttgtgttaattggttgcgaaagaagtggaaagtatagagcgtggaaaaaaggttttttaccttcaagcacaagtagtagaaaatgcgagtgtccgtttaagttgcgggccaagccaatcgcgcaaagtgaagggtggatggtgaaggtaatatgtggtagtcataatcatgtaatggccaagtcattttgtggacacccatatgttggccgaataaatgttgaggagaagacaattgttgctgatatgacaagagcgatggtcaaaccgaaaaatattttgctaaccttgaaggagcacaatgcagataacgtaacaagtttgaaacaaatttacaatgcaagatatgcataccggacgcgtacaagaggtgataatactgaaatgcaacagctaatgaagcttcttgagcgtgacatgtatgtacattggcatcgagtgaaagatgaaaatgttgtgcgtgacttgttttgggcacatccagatgcaatacaattgaccaatgcatatcatatggtgttcttgatagacagcacttacaaaacaaacaggtatagactacctttacttgacattgttggtgtgacacctactgggatgacattcagtgctgcatttgcgtatttagaggcggaacgtacgaacaatgtggtctgggcccttgaacggtttagagggatttttcttaaaagtgaattttttccaaaggtaattgttacagacagagatttagcattgatgagtgcagtggagacagtttttccagaggcaaccaatttgttgtgcaggtttcacattgacaagaatgtgaaggcgaaatgcaaaacttatatccgacagcagaatgcatgggattatgtcatggatgcatggggaagtgttgtcgactgtgctaaggagaatgaatttgatgattatgttagtaagtttgaggttgcatgtgctccgtggccaacttttgttgattatgttaaggacacctggttgacttcccacaaagaaaaatttgtgacagcttggacaaacaaagtaatgcattttgggaacacaacaaccaacaggtgactttctttgtcttaaattatgattcgcatatgtataaatgctgttaaattaattgttttttctgtaaattgtagagtggagtctgcccattggaccttgaagaggttgctgcagaatagtcttggtgatttatgcacggtttgggatgcgatgaacaatatgataaccttgcagcatactgaaatcaaggcatctttggaaaggagcacacatatggttggacatgtttttaaagtgacgttatacaagagactcattggcatggtgtccaggtatgcgttaaatcaaattgctgctgagtatgagcgggtgcattatgcgggaaaaaacccatctcgttgtggatgtgtgcttagaacagcgtatggtttgccttgtgcatgtgagttgtataagtatgttcttgcaagcattccaattaacagcgttcatgtgttttggaggagattaaacttttcggataatggtcaagatgaaaaccaagtaaccataacagatgagatggaagccatatctaatcgttttgataagcttgatttgtgtggaaaaataacactaaagtcaaagcttaaagaaatagcgtttcctgataagaattcgatgtgccctccagctgctaaggtcaaaactaaaggtgctcaaaagaaaaacatctcaaagcacgaacgttcgacaagaagggacccgtcttacttcgagtatgtcgatgagttacattctgtgcagaatagttgttctacacccgtacagtgcagctcctcatctgatgttctaatgaggaaccggatggttcctatgctcgatcaatttcatccatttatgcagaaatttattgttgacattactgatgtcaaagctgatggaaattgcggatatcgagttattgcttcgttattaggttacggtgaagagggttggtcattagtgcgcaatcatctccttaaggaacttgcacaatggaccgatcgatacattgcgttgtttggtgggatacataggtttgaaatgttaaagcgatccctattggttgatgggttgtcaaaggtgaaaattcatttttattttacttaacattagttgccaatctgttatgttatccaggcatgttttattaaacaatgatctgcaggtgaccatggagaagtggatggatatcacagacatgggacatgtgattgcatcaaggtataacgtcgtcctagtatcgttgtcacggcaacaaagtatgaccttttttcctttgatgggccaacctccgacagatccacgggttcatcgagttttgtgcattggtcatgtctttggaaaccattttgttaaggtaagacacctcctaattactttggatgcatgcttgaaatttaatatattagattcatgatttctgcattaaacaggttactctggccgacaattgtccattaccgttgacggcatgtttgtgggctagtcactgtacaaccgaagctcaacagtggccttactattacgttgatcgaatgcagttgtatacgaaatcaatgaagatacgaacagaatatgttgatttgggaaatgtttagacaatagacgctcagttgacaattgaattgtatgcgttttcttatttaatgcataagaatcattaaaaacatgttgtgtgtcttaaaaaagtcaagcgcgaagtaagtgcaacataatgaactatactttaatatcgatcaaaatatatatcaatcactgtccagtaaaataatgctagtaactcatgtaagtcgaggtcaaatgtatacaactaaaatgtacaaaaaaaaataaacatcaatgtctatgctaagcaagacgcctcctctgtggtcggaaactccgtcgacctctgctgtagacaaggccatcctcagtgacgcctctaacatgctgaagcagctgctcaaccatggcccatgcatctgtgccttctgtcaccatcctcatgtcaagcatatgctgcaggccctctgcaacacgttggcacgcatgctgcaaataaacaacacaatttggttaataaactgaacatctaaaatgtaatccgtagagactgcaagaaataaacaataaataccaaggcatgaagtggtctctgctcatgtccaccactaggtggctcagatgaacgagcatgtccacctgtgggtgcatcagaaggagcatgggaatgggtcggtgcacgctgaggcagtggtggaatctgggaagtcgcctcctcatacgcagatggagtcatgaatggatgggacatgcggaagaaccaccccaggtatgcagcaccacagtgacctggatagtcaaccaagtctccggtgtccaccatgtgctccgcaaagtgaacccacctgtcctcgatgtcttcaaaagaaggaacaccgcccacaggctggggtggaatatgctgcacatggccaaactgcctaagcaccctctctggtagatacctagtaacgtgagggccccatctaaggaaaccggagaataaactgatggacggaaactccctgtgcggccgatgctgagtgtacggtgtccaagaaatatcagatggggtcaacctatctatacgtctacgataggttgccaccggtaaggccttcgcactcggccaccgacaggatcgaggctgcctctcgtcgtagtgctcatctgcaggaacatttcctatagtaggaaaatgctcgtatatccagcactaaaaattcaaaagcaagccaatcagcaaaacaaacgacctataaaacatgatttttctaattatacacatcaaacaacattactacctgtaacagactgatgtatcctgcaagatgcttcccgtgatgctgacatgcgtagctcaagttctcatacatgtgaaccagagcacccgcaccccaggcgaatcctgcagatcggtcgaagtctcggaacgcctccaagaataccacagctatatgtgtggcactcttgttggcgaacaatgtgcagccaacaaggtgaagtagatatgccctggcggccaaaatccactgcctcgcctccaccttcgtgtaatatgtgtcccggagccatgaaagtctgacataaggcccatgacactgggatgtctctgctgcagcctcctccagagtcacgtcaagtagctccaccaacaatgtcatcgcctcgcccacatccatctgctcgtatgagtcgaatatcccataacagggagatgcagcagtgatgacacgtcgtcaagtgtcaatgtcatctcacctacaggcaagtgaaacgaacatgtctctgggtgccaccgctcaacaaatgcagatagcaaccccctatcacctgtctccactgagcatcgaatcaatggactgaggccagtggcagccacaaagccctctatctcaggtacaggcttccccatcttaatgaccttacggccatgggaagcaagcttcaactctgcacgatcctgcatttaacatattatttaaggtaaaattgcatggataaccaaatgcatgacgacattcaactatgttttttggcatgtcaatacctctccggcccagacgcgtacggccacatgatcgcgaaatccgctcagcagagatgaatcctctggcactccagggaaagactccgacactgggtccatatcgtccatgaccgcatgaccctcctcagtgaccggatcagccgtctccacgtgtggttcctgcacggcaggaacatcgtcaatagcaacgcccgccctactacgacgtgcagatgcagtgggcctacgcctctcaggggcaccatgctgatgacctctcccatgtgaaatcgctgaagggtcaggacttcggccaacaggccgacgcactcctcctctggtcctagccataatctgcatccgcatggtgtatttcagtttttcagcttcaacaacaacatcattctttacttgacttgaccttgtctcataacatgcaactatagtactatatatctaggttatctcagccatgcttgtcacaattgtgaccaagcataaaataaaatgccataaaaatgactaaataatgggagtgttcaagttagactttaattactctattgtatccttatgttgtagttagactgttctatttaggcttctcttggtcttgctttaagaaaacctgatgatgggataggattcttgaaaataagcatctcattggctccattttactggagtgccacatgtgattattacaatccaggttattctcttctcctgctcaggagctaatattacaatctttaacattcattcctacctttcaacattaacaatactatttaactcttccaagttttggcttttgtaactgcttatttagtgtacctatctaaaagattgttatcactttaacactgtttttgcaggcaaatcaaataatcatattcataaccgaagcaacaggttttactggtagaaggttggattcctccattaggtgattcactaacaccatattaatggttcaactactgcaattcacaatatgtgtatacattaagtcctactctaattaaaagcaaccaatacatattttcaaatttcgacaactcagcctcacaagcatagttaatttctaatcatataaaaaattaaattatatttttttcggcgcaatcacatatattgacagctcctctttaattattttccagttttccaaaaaaaaaaggcaatttttatctgcagtgacatgctacggattacaggatccgtacgaatattacggattgttgaatccgtaaaattcatacggatcctgtaatccgtagcagtggcacggattcctcaatccgcaagatggacacggatcatccaatccgtaggacttttatggattacgtaatccgtatcatgggtacggattgaccaatccgcaggatttccacggatcaactaatccgtaagacttttacggattacataatccgtaaaagtcttacggattagttgatccgtggaaatcctgcggattggtcaatccgtacccatggtacggattaccggatccgtgtccgccatgcgcgaccaacagacctccaccagacctccatgaacggcgattcacaagccttaaccaacaaagaactcaccggggtgacgacacggactaaaacgcttcaccaccaaagcaatgtgcttgccctgtcgctgcaacaaaccttcgacaaactccaatgctgcggcgacgacaacacggaaccgaatgcgaacaacaagcccggaagaagtctaccctctcaatgatgctgcaacagagggaaaatgaaccgtaatagagtgatggtgttgccggaggagaggaggagaggagaagaagcttgaaccgtgcgtgtgggagggagggagaatggaagaggaaaagctttttcaaaataatagttaattttttttaaattgaagggtatatctggaattacactgttaaaaaatggtgtataagatattgtaatggtgtaggaagctcaccactcgagttaaatccctttttatggcccatgattttaactttttcaaaaagatatttttaatttacatgtagtataatttaattttagtttaccagataattttttttatttctttcttctataaaattttatgaaaaagtttattcaaaaggaccttaattaaaataaattaactttaactcattttttaactttcaaaataatattcggtaaaacaaaactatcaaaatagtaaaaaaaaaaggaaaaattgtatgagaaattcaaaacaccaattaataatgactcgtggcatttgaagaatcacaggattaataagtaagttgccataacaaaataaacctcgttttaaaataaaaattagtatttgcaaattacaaaaattatgaataaaatatttatgttttatttctcttaaaatttcaataaaaaattcaggatttaatcccacaaagatgataaatcttacattgataattaattataagcatatattttttaattactcccttcataaaagatatgtgtataataataaattaataatggagggagtataatatcaacaatttttttcataagagatactccctcaatcctaaaagaagagttatcttagattgtttacatatatcaataaaattaataaataatgaaagacaataataattttacaaaagtaactttaatattaacatttattacatttaaaaactataataacatttagtggtaaaaaataattaatattatattaaaattaaaatacaacacttattttaaaatacttttttccaggaactttagaagatatattctctccaaggttgtattattctatatggatcaaacatagatcctccccacaaacacaacttatattgttaacggaattacatctattccattggattgttgaagttttatctattcctatgttacaacatttataagtttaaggtttcattcttaaataaaactataagactgattttaagagttattccattcttcatctaatcatgtatgtatggtttcttttctatagactattgagcatcttattttacttttttttatataattttttattcttttcaaatactattactcaattttagtttttattttatttcaattttaaattctaagtttttttatagatatagttaaattttagggttattataatcttaattaatgcaaataaatttattttgaattttagcattatattatatataccaataatgaggatttgtttaaaatgattatgatttatttccataatttcttctccaatttggaaagtcttatacctataatttattcctatttaatataacaaaatattttattaattaataaagtactgatattctccttaatttttttcattaataaatttatgaaaaatcatagagtgtaaaaaaattagaaatatttcatccataattgaacaaaatataaaaaaaaattaaatatactgtcatttaattataaactactacatgtatgataaaattgttattgtttataataattatttttataaattataaataaaatcaagttgattaactttacattgataacataaatgaaaactatagtcaaaaataaaattacaggtatagtaagctagctaattatatccattgcctgtgtgagtaaacgaagatgacgaatcgatgatacaatattttaaagtgaactgaatcaactcatcttcgcagtcatactattatttagccggctatagcttgctaattgaatttgtatagattgaaacatcatccaatggctccaagtgtcaagtgggattctgttctgctaccctacctgaatcgaaaagataatcaataaagcaaattaatataattttcaccatcatccaaatttatatattgtatgatgtgatgtgaaccccatgatgtctataatatctgttggtactcttttaaattttatgtaaagtgtatgaacaaaattattttctttgtgacattcataacagactggagtttataagttaattaatttattgcccagtcagtattaattaattacgtactaaaccatttttctcagcaaattgtttagttttaataaacaattaatctccaaataagaagttttagtatgccatattttatttttagccgtgagtgattgccaacgattcaaagggtgccctggcgttgattaaatagaaacactcaagtgttgggaagctcttgtcttggatgatccccaagtctttttcttgctggagagttgctttggttacatgcataacctacaaagaagatttcaaatgcctaatattttatggaacttcttccatgactaaaaataaagtaattaatcttaatttttttataagaaaattaacggatattttttttaatatatatgtatgatttgttatatgtgtatacacacgaatatatataaactttatgttgattttttcattagcaatgaaaattagttattttattttctaaagtaatcctgtagtttaaattggactacattactgaaaacaagtacgtgatgaatctttttaataaaatatgtttttttttatctttataaatatccttaaatttaatttattatgtcctttatttttatttttttaaaaataaaaataaaagacatgataaattatacaagattaaattgaacttatatgaaaaaaatagttaaacaatgagatatagattggtcttctctgaaaagatggtgatccaactcatataatccattttttagtcattttttcttttcatctctccctccttctttcatcattcttttcttttatttttttaatctcctcgtatttattattgggttcatcaactattaatcccaattaacttaagtaaaagatgctatagatgttaatgttaattgtcgtttatttttatttttatgaatttggttttgataagtttttttaaacaggtccctctcatcacttaatgacttaatgatgatgtgtcagtcagatttatatatatatatatatatatatatatatatatatatatatatatatttctaggacactaaattatatgatttagtaagaatttaatgttttcttttttattcgtgtgagaatcaaattcagatatcatcaattttatattaaggcagaatgcacgtatgtagattagattatgttagttgtttctaattttagtgcttgagaattgagtttcactgtgttataatcataatttgagatcccccaatctattttggtaggatatagccattttgtactcgtcattatgcttcttgctgacgctgatggaaaactaccttcgaatcttcctgttctagagtcggcgaatttccatgtaactcaattttgctatcaaccaagaacactacattctccttctaattccgcagaactgatcataagccaataaatgatagtgaccttattaattaattatgaggcatttggtgtgtgcataattatcttttacacatgcattgcctaattggatggatgtatgtatatatagggaagagaatgctcttcccttgttgtattttactacttccatttcttttgaattggctattacaagaagttttaatttctacagagtcatggtatttcattatttttgcttcatttgtttatattattacatgcttgttccttactgttttcaagtttcttgcatgccacttactacttcatttgcacgcaggaaaatcgtgttgttgacgggaatgtggagaagatgcagcgggaggagagagcagatgatctggttgttcatggaaaagttgatcggaaaggaagaaaagctttgaaacacaaacatggggggatgaaagtttcattgctcgtacttggtaaactaggattgacatatataatatgagttcataaacagtaattaacatgaaaatgcatgtatatacatatactaattaaggtgtggattaattatactacctcgtagtactaattaaaccctgaagtgatggcaagtccttaatttaatgaccacttaccatgtgtatataaaacaatacaagtttggtgtggattaattatactacctcggagtactaattaaaccctaatgtgatggcaagtccttaatttaatgaccactaaccatgtgtatataaaacaatataagtttcattacatattgttgtgtctttaatgtttaaagcaattaattaattaagacaaatggataaccagttacacttactacattggtaaataaattaaaaaatatatttttatgaaatacataaaattatattatttataatttttttttacattcttttataatttttacactatataaatatattttttaaaattttttaaccaatattctaaggagaggtcgacacaagactcattaattaattgtgcacagtgcatatacacctcgttcattaattgatgcagtaagtgttaatttgggtttgcatgggtgcagcggcatttggtatagagaacttagcaactctgtctctagcagtgaacttggtgtcatacttcactggtattatgcattatgaactagcagatgcagctaacatggtcacctattacatgggtgttaattacatgctctccattgtggtggccgttcttgctgatacttggattggtagatacaaatccgttgttatttctggaatcgtcgagtctttggtaagatccaaacttaccttaattccttattgcataataacataagttactaatcgttattggtaaacccaagattatatatattgtttatgtgagtttgaccacatatagcaacgtaatctattttttaaacccacctttatacctattctctttttttttttcgattacctcatttattatttttattactttctttcttttatctctcaaagtatgtatataaggaataataaacctagattcaaaaaaaaaaaaaaaaaaccgttgactctcaagtatatagtgggaagagatatacatataaagaaaagaggggggaaaataaatgtgaaagattatatgattggaaaacatcaataaaaacgtaaaataaatataaaaagtgaaaaatatatggtgctgatttttctctatcatgctcttgaccaatatatttacatgaatcataatcaagtattataatttatttcttataaaatgtgatatttttaaatatgtgttacatataaaaagtgattgggatgcatgaataggtggttgtctagaatcatctaataatttttctttagtaaatagatatgatttttcttgttcaccaatagttttcactaattatgaaataaaataaaagatatttattggacaaaatatgaaaatattgaagataaaaatgttttttaatagttttaattacttattttgatttttggaaaatatttttaaaactaaaaaggttaccctaaacataatataacagcccagtaacatcaagagctggaacatgaaagagaatttgataattaaacatataaatgaaaaacagtacagtaaacggagatgttaaactttattaaatgacacctttagtttttttttttactctaaatcaattaattttattattaaatttaaattaaattcttttaaagttatatatagttaaataattagtttatactttattattttattttaatgtatgatatattttatatatctgccaatatttaaattaatcatctaaaatttaacaaatatatataattactgaaataataccctatttctctgtcactcggataacagattctagctagggtgattattagacattatataattgcaggtactcatctaatgattaataatgatatcaattatttaatttaatcaaataaaacaaattagataagaagtatttttaagttattatttaacaacttatatttaagtaaaaagtttaatatctttaatagaaaatctcattttaagatcttagttattatttttacgaatcctacaatgttatattactttaagattttatttatattttattttaataatatatctcattttaagattttaaatcattttttgtatatcctacttacactaatagaatacaagtcaattttgtgaaaagagtaaaaaattattatttttaaatggatactctaatagtcatatgcactaacattatacattgtccaataaataaatcaattatatatatatatataaaaccaataaacttatcacatataatatacaaatgttttacatattatcttttttctcttaaataaaaccaattgaaagtaagcccaatttatatatgcaactaatttactttaaataattttctaaagcttattcaatcacaagtgcatatatgcatgaatgtgttgtagggactggcattgcttacgatacaggcacgcgtgggtagcctgacaccacccatttgcagcctgtactatgtgagagatgcacattgtgaaaagcttagtgggaagcaagaagcatttctcttcattggcctctacttgttggcctttggtagtgcaggtttgaaggcttccctgccatcacatggtgctgatcaatttgatgaaagagaccccaaagaagcaatgcaaatgtcaagcttcttcaacggtctctttttagcactttgcgttggtggtgcagtcagcttaacatttaatgtgtatatacaagacaataatggatgggtctggggctttgggatctccaccgttgctattgttttgggcaccattatctttgcctctggattgccactataccgaattcatgctgcacatacaacaaacggaatattggagatcattcaggtatacactcttttgcaaaccttgttctgcatgtgctgtatatatttcaatttgaaaatcatatttttttttatactcacgatattagtgtgaaatatttattgattttattgataatcgattaatctccatcgaaaaacctagttgacctctttaagtggctctttcctctccatcatgtttttttcatctacaaaatttaaattcgagactttatgtaaagaaataaagtccagtattacccagactaaaatttgttggttgaaaaagtatatttttgagttcattaggcatgcattatgaaagtaaatttttttatacaaattgttaaccaattaaaattgattcatagtatgacttttaaatagtatattataaaaagacaaattaataaacttttatgaaaaccctttacattgttggtagatatattacttaattctatttttatttacttatagtctgattctgatacaatacaatagttgaagtttttaatttagctcgatattgcaatgatcaagcgcattagttttgaattcttcgcgtctattttccaggtctatgttgctgccattcgcaacagaaaccttccccttcctgctatccaactatatgagattcaacaggacaaagaagccgcagtggaaatagagtatcaaccgcagagatattttcaggttcaatccgaccgtgtctaatatgagtgaaatactatatgttaattgttgatagcttaagtattaaagagtaatgataaatgtatataccatggggattctccacagtgtctacctgtcacacatggctaaccatgtgtgcaaataaatatgattaattttatacaattatcgatttgaatttatagtgcttgtatttaattaactatgtctgcaagtggttaatagtatcacgaagttatgaggttattgaaatgtttaacgttggttaactttacctcacaagtcggaaatgattaataggaagggaacttgtatatataattatcattatgtactattgacacaaataattaaatatgtctcacaagtgattaattttcttttgcacaggttcttggacaaagcagctatcaaaagtagatctaatgagcaacctgagaaccaagagactccaatgttggattaaactttaataataataaattagaaatgtgaagattcatatctctaagagaagaagttactcatgtgaaaagtcatgtctttacatgagtcatgtctttaggagaagaagttactcatgtgaagagtcatgtctttaagtttcttataaatagcatctcatgtaaaaggtcaaaagtgtggcttggcagacaattatctaaatacatcagaagtattctaccaaagagattgttgtgtgtttgtgcgagtgcaccagtgtgtgtgaggacctgtgataccacaaattggtatcagagcattgagaaaatggagagtgggccaagtagtagtctgccattaccccgccttacaaaggctaattacgaaaattggagtatccaaatgaaagcccttttgggagcccatgatagttgggaggttgtccatggtggtttcgaggaaccaacatccacagcaggatatacggcagcgcagaacaagacattgaaggagacgaggttgaaagacaaaggggcgttgtacatgttattccgggctgttgatgattccgggtttgagaagattgttggtgcaacgacttcaaaggaggcgtgggacatacttgcaaatgtctacaagggtgccgatcgagtcagacaggttcgacttcaaactctccgtggagagttggaaggaatgaaaatgaaggaaggagaaggggtatccggtttcatcacccgggtccagaccgtggtaaatcaactaaacagaaatggagaggtgttgtccgattccagagtggtggagaaaattctgaggtctctcactgacgacttcgagaatgttgtatgtgcgattgaggagtcaaaggacctagcaacgctcaccgttgacgaacttgctggttccttggaggcgtatgaacaaagaaagaaaaagaagaaagaagagtcactagagcaagcactccagacaaaagcttcaatcaaggacgaaaaggtactctattctcaaaacttccgaggaagaggacgtggctatggaggtcaaggagatggtctaggtagtaaaggccgcggtcaagaaggaaggaataaggagtatgctgaatcaagtcggcagaattggcgaggccgaggtcgtggaagaggccgacattcaaatcaatcaaatgtagaatgttttaaatgcggaaagtatggacattactcgagagattgcaactcggacagatgttacaactgtggtcgagtcggacattttgcgaaggattgtcgagatgaaagaagaaatgaaacttcaaaccttgttacagaaggggaagtaagagatggaggaattctgatgatgactagaagtgaagtcaaccagggatccgagatggaatggtatctagacactggtgcaagcaatcatatgtgtgggcataaacatttgttcagtaatctgagacaaatagatgctggacatgtttcgtttggagatgcttcaaaggttgatgtcaaaggccgaggtacgatttgtttcttatagaaagatggacgaattgtgcgcatccgagatgtctattacgtgcccgatctaaaaagtaatattcttagggtggaagagaggattcaaaattctagaaaagggtggagaggattcttgtttgtgtctccagcattaggctgttgagagagcgtctccgagaggttgagagcaagttgagagcgtttccaccattgttgttggtgaggttgagtgtctccggctgaaggccgttgagagtgattgtaaccattattattgagaatagtggattgttctagactaggtcccgtgggttttccttttgaaggttttctcccacataaagctattgttggttgagtctggtgactccccagtgtttgtggttggttgaggtgttgctcccaacagagaaggagattgtgtgtttaatcccatcaaagtaagacagtccaaccgagatccgtgtagataataagtcagcaatcgagttagctaagaacctggtcaatcacgaaaggagcaagcatattgacgtcagattccacttcatccgagatcaagtaaaaggaaagaaggtggaattacttcatgtggcaagccgagatcaagtcggagatgttttcacgaagccattaccgacattactgctggaaaattgtaagaagatgttggggatgaaagacggaagaaatatttaaagtttatagggggattttgttggattaaactttaataatagtaaattagaaatgtgaagagtcatatccctaggagaagaagttactcatgtgaaaagtcatgtctgtaggagaagaagttactcatgtgaagagtcatgtctttaggagaagaagttactcatgtgaagagtcatgtctttaagtttcttataaatagcatctcatgtaaaatgccaaaagtgtggcttggcagacaattatctaaatttctttttctttatagccactgtctgcatctctgcacagaatcctttgcattgttcttgcataattaatgaagcatcattcaataactcctcctgaattctccttaggctttgtttgggagttaggaggggaagagaatgaaagaaattcaaggagaagggaggggaatgaaagggaggaaaatgagaaaagtttctttctccctgtttgggagttaaaaatatattaagagagagaaatagagagttcataagatacttttacaattttgtccttatttcaaaaattaatacactctatattttacaaataaaacttaattttaaattaaaaaaattatataatggtttgaataataattttattacttttccttctaaaaacctccaaatcggaagaacaacaattttaatggtttggaggaattcagagaagttttaaaaatccccaaattatttttctcaaaaattaaaactcccaaacaatgagatgttataacccaaacctttccctttgcaacaccccgtgtgcacccggtgtattaacattgtacaatatcagagtgacgcagcatgcatggaatcaaatagtaaaggaagcgtaattcattataatatattaaaactttgtacatacatggtgaattactgtcatatacataccatcttttccagaactatacataatgacctctcagggtaccaaaatacaatcaaaataatcaaaatgggagcctacaagctccggtgatctagacctaaatgtcttctaactatcccagtgcaggccttttgccttgggatccttcagggacttctgactctgttcctgcaacataagcccaacaggggtgagataactatctcagtaaactcagggtcctcagaggtcaccctcccctggtttacctcacaacacacatacacaaatataatctatacatgcataacaagaatgattaaacacaatcatatttcaatctcaacatatcatgagaacaagtcattcacaatgcttaacataaatcatacaactctatgcatccgcaatcaaaactcatgctatctgtgcctgactaggctcatccacctactcgtgggtacctctagtcaggacttaacgtccaatacctgaataggctcatccacctactcgtgggtacctctattcagggtttacatgaacgcctatggattaccctaaggaggatcatccacctgctcgtgggtacgtctccagaggggtccatagtttctcagtctactggccagtagataacaaacaatcagatcacaatcaaacaatacatcatcagcatcatactcaataatgcatacactatctcagtgtgatcaggaattcatactcaatatcatcataatcataaggcatctggcatatcattcaataccatatcaccacaaggcatataattatgtcaaacaaacatccagagggttgaagcaaacacaagcaagagaaacaaactctaaggacactgagcttacctggtcgtagctcagaaccagttcccctagtatctggatgagttctaccaacaagctgtgcctcacgccctacagtaggcatgaaccaaaacatcagaaacggcattccaccgttatcagggaaggaaataccttccactcataatcaataccaaaagtctgctatcctacagtttatctcaacccagcatctcactaggccacacattgcccttcattggcttgcctcagccttgccaatgcctcagagttctttcagaactctgtatagttcaattcaagcctatatcagaatcaaggatccaccttgattcaattcagcccaaatgcagatacaactacgttttcaccggttattaggcgtcatgagtaactttaataaagacacttgagctagttcagaccctaacatagctcaggtcctcacacttttctcattctagagtcaaactcaaacctcatcacaatttagatttcaacatgttatatgactcaacaccacctcctgattacgtctctctaaagaacttaagcctaattccagccctataaccaattgatcactattcattcaatttctcaattcacaatagaacggttaaacagaggttttcttacctcaaatcaacggaggaaggctggagaagtctttctccttgctctggtatcctggaaccagctcctattccttcctaaacccactctctgagaagattcaaggaggtgaggttttctctcaaaatctcactctcaaggctggattttggctcttacgtggctccaattagatttagaggtgtttagaaggtgttttatggctgaatgatgaagttatgaagctcaggaggtgctccaatggctgctgggacgagggaggaagatgaacagtgttttcttcctctcaatttcgcgttttgcctttatatagggtgtctgccagaggtctggcgcgactcgcgccacctccggcgccacccgcgccagaatggcggtggacatggcgccattggcgccgtcccggcgctgttagcgccaatttccagagactccggcgcctcaagcgccgcatcccacgccccaggcgtgagattccagagaaaattgaacttccacccatcttcccgcgccacccgcgccaaccctggcgctatccgcgcggactggaaatctgtggcgcctcttggcgtcaacttccacgctccaggcgtgaacttccagagtgtatggcgcccttggcgccaggctggcgccgtcagcgccaccttccagaggtctggcgctggtcgcgccaataacggcgctactcgcgccacagctcaaaagttgttttctctcaagaaacctggcgttgattgcatgaaaaccggcgctaattacgccaggtctcagggtattatacccttccctcccttccctttagaatccctctcccaaacaaaaccttaaaagaactttcatggtcattgttgttctcctccgatccttcacattggttgtttcctccaaccattattagtatatgtttcacctctatatataaaggaacttcagcaacatatgacatccattgtactcatcatattttgcaataacaataaagtgaactttgatatcatattataatttgaaaaaatgatacaaatgatattattttcacgtatccacttatcataaagattaaagccggggggagaaattttataaatatgaaaatgtgattaatataaaaaatatttgaatttcatatttatttgttcacattatctttctatttattatttttcattacaaaagtttgtcaaattaataacatgagagttcatataatatattatggatggtgctataatactaaagagtcctatttaacaaattcagaattgaactaaataaagttgcatgtaacagataacaagtatagtatagatttctgaaacaatttttttaatattacaagtaattccaaaatctaagttgttttttcccctctaaatattgataattcctgttggaatatgagcgtaatcaactagagtcaatttaatggtcgagagtttggagatatatatatatatcaatatagaaggatcggaatatttctccaacattatgtgataatacatatatatatatatatatattcctttctgatttcatttaaggagttttgagaaacattttcctactaaataaaagtagatgataactaatgactttcaatttcaatttttctgccccaatttcatcgtacatgtagccctcgaagtattatgacaagaaggtacgtagttgtaaaccaggttaccgctaacacctacttatcaattacaaaggataagcataccaagtgttaattccctagctaattaacacaatgtatcatttcactttcgaattcaacattccttcgatgtaggaatttcagcctaaattaaccaagctagcctccctcgtaaagcctcattcctgcaaaataaacgatgcctaggatggttaattaattcttaattggtttcatcgatatatcattcaatcattttgtttactccccagcaatataatcctgttaaagacatcacatgtacaaattcacttttattaattacaaattactgttatcctttggaggaatattgaaatatatattagagataaaagtaatctgttcccccatctcatcgaaaataacaaaaggtgaacactaaagtcatgcaaatcgatatatatatatatatatatatatatatgtatatatccatctcaagacgggtaatatgatcatttgcaattcattcatgactattaattaataatattattaaccatatggatgaaacaagctcaatgttgttaactgtaagccattaaccagaaattcatccatcaaactattttcaactaaaacagcatacagttctgatgtaattcaagtttcaaaataacgagtcccagaatgaatacataaataggactgtatgttaagagaaaacagtgggtgcttggttattcaagtattgccaagtcataaaaaaaaaactacgtactccattgttcgaaggttccacgttatgcgtaggtaagggagagggaaattgtacgcagccttatccttacatatgcaaagaggctgtttccagattcgaacccatgaccaacaagtcatcaagtcttcaagacacaattacgtgcctagtcataaataagaaaatctttaaatgctaacgatcaaaatgcgtgcgataaagataataattcatgctattaatttcatcaaactaatgattaatacttaccaaccaatttggatgctttgttgattactccccttgaaacgccagtcttgcaaatacatagacacttgctttgtgatcaaagtgtttcaccttctcaatatatgtttttcaatctccaaaagcaattagcatagaagcatcaaactctttaaagctcgatcgacatcacatgcatcatcaaatagcaaaaattgggcttacttctaaatcagtttctcacccggagtttgatccactcgtgagcaggttcttctcttttctcctagctctttgataacgtttactcttgagcacatagtacgtcatagtaccaagaacaccaagcattataactcccccaacaacagtaacaaacattgcagcccacttgtgatgcctaccaacaactatataagacgctgatgtgaatgcaatggtggtgcatatagacgccaaccacatcatcttattgatccccttcactaccctcatctcagactttgttctccctgtcacaagtgtgatttgaaccaccacaacagccagcgaagagaaaaacgcaacagcgttgaagatgaagaagatatctaagggtactgtgcctaccatcactgccaccccactatcatagtctccaccgggaatgctgaaaatggccgcaaacgcaagcgtggcaaagagaaccacaaccacctttacctgttggaatgaaattttagaagtgaagaaaatatttgagaatgagagattagaaatgttttggaggaagagggtacttgtggcttgttccattgtttctggtgagttgtatgatgattcacctagtgtattgtaattttaatgtgggatgactttttgttagatattggattataagatagcatctcaactgcaggtcattttacatatttcagttcccctaagggatattttagtgcatgtaatataaaaacaggctactaggttggttatgacaggacatctttccttagtttttcttgtataactctattagtatttgtaaaaaaattccaatttgaaaattcttagctcctcactaacaatgattagcatgggctgagtactttgagtttgagccaaacttaggtggaggtagtccaaccacagccactcttctatactggtttgtgttctcaacttatctgggactaattactgtttttatatttgtatgctcaagtgttcaataaaatgacccctttacctgcaacattagcaattgtatcaactcattatctagtctgatcattagcttgtgcgaactttcagagtcatttagatgtagcaaacacggagctttgtaaaatttgtaatgatttcttgggccctttattttcaacaattgtagatagtaaccttcaacttcacgatggtgctatattttacatggtaaactttattgtttaaacgagtttatatatgcataatgaaaaggaattgcagtaggacagctctcttattctccacaaccatcctttattcatatagatggataatgagcttgtttgtttaatttttccatttcactggtatgagaaataagcataattgtcctgcccttggtatatggaagaatttatgggatatatttaacatgaataatattcaaagggaacgaaatggagttgtgctatcttaaattgttggaactctagaatttttcttacacgctacaatttgttacattgtattattgtatgggacttggaaagtaaacatgcttccctatccattgggcaagtcaattatgaataatggcatggctaagctgagtttctttacctttattctgcattaacactaagcttcttaacatttgaaagttgtagttctaatttaaatattttggcaccgttttcttttatgagataattagatctcatgatttttttttcttttccagattctaaaccttgtacagaccaaaaaaatgtaaggcataagatgatcgttggagttggatttggagttacagttctattccttgtcattatcatagttggaatcttttggtggaagggctacttcgaaggaataattaggaaaataaaaagtaaatatatactatcatgttcttaccattctgaaattagtttacttcatttgcttcttaaagatttccaagttcaacttcccaaaaagtcaatcacttgacttagcgtataggaactgtgaagttagctaggtgctacaagacgtggttgatatgttgctagcatataatagttttaggctaaaataatcaacaatttaatcataatttatcaataaagattaggataagattaaatttcatcaattcttggtccattacttattttatgcatattttgtttaataggaatcaagaaaagaagaaaagaagcagaaccaagaaagatttgtcacaaaaataaaacagcaggagggtttattaccctaattaactatatggatgtggaattataaatagggacttaggaggccaaaagaaaaacacacagaaatacagacagaaacacagtggagagaagatcaaggccagaatttgaagacagattaatgcttctgctgtctttatatttcttgaggttagacatgaacatgtcagactaactttctttattgtggttagggccaagaaccaatgtgaactcctctgtaatttgattggtattaatatgagattattatgattactttgttttactctattcttcattgcatcattctttattaaatttgaccattctattaaagttctgagggttagagttcgcaatagagatgttgggactttaatttctgacatgagtaaaataacagtttttacattgcatacggatagggatgtatgattgcagaatttttatgatgtattcttttaaatgcttagcttgataggaattgctaaggaattaggatttctgattggattaaagggttaaattgctaaggaattagaatttaactaaatttggaaagatacatcctctgagtaatcagaagtaattgaatttaataaccaattcaagtgaaagaggtagggatcaaaggggattgtgttctaaccacaattatttctcttaactgcgtcacaatccatttaaagttgattttaatttcttaattttctgttatttatttaattcgcataattctacaacataacactactttttttaaacatattgttttcttccaatctctcagattgtgagttacgataaaattaggaatcaatccctgtggatacgatactctacttactcactctattacttgaaacgaacgatacacttgccgtttcacatcacaacagtagtcaggtaagattgaattaatatagtgcccattatgatagacctcattagggattaactatgaccaaagtgggtaagaaggttaagataataggtcaaaagcaaagaacttgccttaattttttactatggcctccaaggcatccaagaatgtgcatttagaaaagtattcattcttggatccaatagcctttgaggattggagataacgatttatctcttctgtgggtggtgttttatgcgtatgaattatttgcatccacttattgccttttatggtgacaagcatttctatgtatattgacacatatcaagcatttgacacataacaagcatttgtactttcctcaaatactcttaaacaatgcagatacgtttaacttactacgtaaaatgaaactggctgttcctctggaacacttattttacggctgacatattgaacaggtactgaaagacaagattgtttaacggggacatttacgttaaaacaaattagagatgccacagaggatttcaatcctgataacaagattggagaagatggttttggtcctgtctactaggtattagagtgaacggccttttttcttccaagcataaaaattgatgttcctccctagcatttaaaattctaaacaactgttggattgcagggtcaattatctgatggtacaggtagcagtcgagtaacactcatcaaagtcacggcagggaaaccatgaatttttgaatgagataggcaagatatcttgtttgcaacaccctaatcttgtgaaacttcatggattttgcatcgaaggggatcaattgatattggcgtatgagtacatggaaaataatatcctggccagtgctttattcagtgagtttctacccaggagtgcaaactattatgtttgtcttttgccttgtcatttattatatattttgtaagataaggtgccaagtgttaattatgataaatcacttggagatctgattaatctgaagaagtttgtttcccgcccttttccatttttctggatacaaaataaggaatgaatgagtgctatagctagttgtttttccttccccttttgtctagacaaattaataccctgtgcttagatttttatgctgttaaacttttcctttttcccatttctatcactttagcagctaggcaatagaattttgcaaccgtgattcatattaattcaaccataacttctttctgcatcttttataggctcaaaagatcaactgaaacttgattgggcaacaaggcttaggatctgtattagcatagcaaaagttcttgcatttctacacgaagaatcaagactcaagattgttcatcgagatatcgaagctactaaggtgttactggatgggaatttaaaccctaaaattaacagattagtagctttggatatcaaagctactaatctgttaattttgttttacagagggtatatggcaccagaatatgcattatggggttacttgtcttacaaggctgatgtttacagttgtggggttgaggtcttggaatttgttagtgggaagaactataagaattttataccaagtgataattgtgtttgccttttagacaaggtattctactatgcttcaatccctgatacatttttggcattatgaatcccttttgttttggtagttatccaatgcaaatatccatattttcaccattctaaagaaaggtaacaaaatttccattgcaggcatttcatctgcagcgtgcagaaaatttaatagagctggttgatgaaaggttgcgaacagaggtaaacccaactgaagcaatagctttgatgaaagtagctctcctatgcaccgctgtaacaccttcacataggcctacaatgtctgaggttgtgaacatgcttgaaggaagaatcagcattccaaatgctatccaacaaccaagtgattttagtgaagatttaaggtttaaagccatgagggacattcatcaacaaagggaaaatcacagtttgagtacaagccgaacaaacaatataacagaagtccttacacttagctctccctaaacatttggcaatgacctggtgttagttcatgatttcattgttgctgaccatattgcaacatgagatatccttagagcatagctgagatttaatcttttgggataaccaactgtaatgatcaccatttttaggatataacatttttcactccgtctttcagagaatatatttatttctagatccgtgtaaatttctaattgctcttgaagggtacttttttttaacctgggtatttcattttgagatattattgtatggttcggtgcagtcccagttaatcttcatatgacacaatcacaagttttcaatttatgaaaacaaaattggcgtgtcatgtggagattgcttgaactaaaatgatctcggaccatataataatttctcatttaagaggtgcatatgaactccttttcactggatatacacaatatttggaggaagaatgtacatacgcacccttgaacttgggtgttatagcaaatagcaacttggagaaagaatgtacatacgcgtcttattaatctttgcgcgactgaaaacctgtttgttatatcttgctcaacttaagaacggcacattgagtttctcctttttatcaggtgtgtggtgtgtgggttcactgggttggggagttagtgagaattacaagttcagtgttatgctccgtatgacaatttttagggtaaaaagtaataatgggtgaagtaatacacctacgtagtgaagaagtgtttctaaggaataagaaatcaagtttcaacgctgccagccatcacagttatgagaaaagaaaacttcgagcttgttcagattaatttgtaaactaagccaccttccccctctttgacaatgatttagttaagactgatgtgtctaaaaaataacttcagtaaattttaaatctctttattttgaatattctactttggaaaaaaaattattattataaatttttattctcaaattaattccatctttgattctaatccattataaaggtgctgcaaacatgagcataatcaggtattaaaggtttaggaagagatgcaacacaagcaaaaatgaaaataaccatcataagttgataaaaagaaaccaaacatacttcaagaaaatataactaaaaagacaaattaaactactaatgttgcattccctaatgatcagcttggggcgtaggacgggataatatagagaataggtaacattcatgaacactttcaataatcactgtgggttccaattcggtcaattatgttagcaacagtttccttgctctcccttaggactttgacactcctctgcagcttttcacgctttccagaaattgaaggtgactcctccaacaacctctcaatcccaccaccactaggggatagcagatcatgaacaatctccttttccaaatccttgttaacaagattgttaatactcagcataagatgtaaggcaattgtgtcaatcaatcttttttgcactatcttccagtacgaaatcatcctcaccttcaaatcaaatgcttgagtaagcacagatgggtattgcctcaagtgaccaacttcaattttgcccacaccttcaagattcacatgcgatggattatgcggattgttcaaaacttcattcagaaaagtatcttgctgagatattaacttgttgtattcctgcacaaactccggattacaagtgtaatcagtatacatctccatttcaatggcctctattacatgattggtggaacttctctttttcttagaaataagaacctggcttgctcgcctggtagacatcaaaagctgatagtagttttcagaatgacgcgtgataactgaaaccagcacatcttcgagatagttccacacattttcaacaaaacctataggcttgttggcaatccctttcaccttcccttgcaatatagaaagaaaagcagtgcgaggcatgaaatttggaagaccaatccactttgcctcctccagcacctttatctcttgcataagaaaattcttgcttgcatcactttcagcacaatggtaaagatcattcgagtaggaatcaagcatctccaccaaccgggcagtacaatgcatgtttttgtcctccaggtactcatcaaattctcctctaagcaaaatttttctgagagattccttagtcaatccaataatatgcataaaagctgtcatggcatcagctactgaagccaagtttgttggcaacttttccaactcagacaaattgttagctagcttctcattgattttttttactatttctggcaaagttttagatatgctcatagcctgaacctgaaccagtttctgtgctagaactggaacacccacgatagacttgtctattttggaaagaagtggatggaactcaaacagtttctgttcttccactctagcatcctcatatgactcatcaccaatgcggtttctcacacaaacataaccaagaccaatgttcacatcatcggcagtaactttttctaacaagccctcaggagacttgtctgcctttgtgaccacagccagtgtcctgaggccagtttggtcaacactctgagacattctaatagactcacaagtagtgaaatcaacactagcagaaagaacattcaggataatactttcttctggcttaatgtactccatgatcatgtctttaatctggtcataaatgttctcaggttgaccatgaactggaacccgagttataccaggaagatcaaccattgtgagatcaggaacaccattcttcttcaccagcaaagtcaaagggttgttggaaatccctttaccatggcctgcaagctcttctgtggcagcatttatggcatgagaaacatttgcttcatcagtggaaacgattttgccattgaactccaagataagctctggggttggaagagggtggttttggagcctcatgaccaagggcaccctagtgcaaatgccttggccacgtggcaagctgataccagcaagagattcaagaacacttgatttgccagatgattgatcaccaacaacaacaatggaaggaagctgaattccctcctttgtaatgttaaggcgcctgagattttccatagcatcaagaactggacgtatcctctcattgtaagaggacacaattggtgcaacaatagcaagaggctgaggctgttctgcagatgggtcagtttcacattgagaaacagatagtgcaacaatagccttagtgctaggtctccttcctccagccattttcaatcacaatcacaatggtaaaaaatatagagagagagtgagagagggatagtttggtatgcttattcttattatgagtgagtgagtaaaaagccagagcttaaatgcatatttatagattaaaaaaaaaaaaaaaaaaaacttagaggaaaatgaaaggaaaggacagtttggtttggtatcttgaaagttgaaaacaagcgtgaattgagcttttcatgggaaccgcagttacagagctgttggggtcttccatgtttaggtaattgaaaggtttctcgttaaatgcatgcatggtagtaattgaattgccgtaaatattagtaacgaaaatttcttacattaattaattcaactcaagtagttttagtaaaaccaaacctgaaggggaatatgtaccaaaaaagaaaaaaactgaagggaatgtagttaaggaaaagggacaattcattttataattcatctgaggaagctataaagttttatttatgagtagttattactattgataacatgcttcggcagtatgtcctctctagtctctcacatactatggcatatgtatggtcgtgacctgtgacctgtgacctgtgagaaaatctttgggtattgcttttgttgtcttaaaataaataaaaaattaatggtgctatttaattagtatggaaaatggtgaatatatactttgtttctttatgtatttttttgtgtgagggatttttgtttatttttggatgtatgacaggaaaaggaagggataaagagagaaaatactaatagatgataaaagatgcgatggaaaataaataagttttcatcattgataaaaaaaatactattacaatttaataataatataaagttctcttagtatttggaattttagacttaagatagaaaaaataatttgtttcattttttttatttttaaagaatttaaaatatttaatataaactctaacgaaataaattatagaggtttagagtaattctattctctataattatgaaattatgagccagctattttaggagaagaatttttatttttatgacttttagttttcgattaaatcctagtaaaactaaaagtttatagtcctgcattagttattcttctaaaatagtattttcgtttacaaacaaaagggtgaaaaaaataaaaatgaggaaaatacaattccatacaataaaatcatattttttttattttttttttatcattgggtgtttctgttacgtaaatggaagtaaaaaaataaaacacaattttattatgcaagtgtgcatgagaatcatatttttgttgtgctttttttttttatccgatttacataattgaaacacatttttgtttgttgtgtttccattcaagaggcaatttggaaatacagctaaaaggcccccacttcgctagtgccaataggcaatactctgtagaatatgcaaaggcccatgattttcattcttctactgggccaacacaaacagcctcgggaccatcaattttatatgttcgagttaaatccctttttatggcccatgattttaactttttcaaaaagatatttttaatttacatgtagtataatttaattttagtttaccagataattttttttatttctttcttctataaaattttatgaaaaagtttattcaaaaggaccttaattaaaataaattaactttaactcattttttaactttcaaaataatattcggtaaaacaaaactatcaaatagtaaaaaaaaaaaaggaaaaattgtatgagaaattcaaaacaccaattaataatgactcgtggcatttgaagaatcacaggattaataagtaagttgccataacaaaataaacctcgttttaaaataaaaattagtatttgcaaattacaaaaattatgaataaaatatttatgttttatttctcttaaaatttcaataaaaaattcaggatttaatcccacaaagatgataaatcttacattgataattaattataagcatatattttttaattactcccttcataaaagatatgtgtataataataaattaataatggagggagtataatatcaacaatttttttcataagagatactccctcaatcctaaaagaagagttatcttagattgtttacatatatcaataaaaattaataaataatgaaagacaataataattttacaaaagtaactttaatattaacatttattacatttaaaaactataataacatttagtggtaaaaaataattaatattatattaaaattaaaatacaacacttattttaaaatacttttttccaggaactttagaagatatattctctccaaggttgtattattctatatggatcaaacatagatcctccccacaaacacaacttatattgttaacggaattacatctattccattggattgttgaagttttatctattcctatgttacaacatttataagtttaaggtttcattcttaaataaaactataagactgattttaagagttattccattcttcatctaatcatgtatgtatggtttcttttctatagactattgagcatcttattttacttttttttatataattttttattcttttcaaatactattactcaattttagtttttattttatttcaattttaaattctaagttttttttatagatatagttaaattttagggttattataatcttaattaatgcaaataaatttattttgaattttagcattatattatatataccaataatgaggatttgtttaaaatgattatgatttatttccataatttcttctccaatttggaaagtcttatacctataatttattcctatttaatataacaaaatattttattaattaataaagtactgatattctccttaatttttttcattaataaatttatgaaaaatcatagagtgtaaaaaaattagaaatatttcatccataattgaacaaaatataaaaaaaaaattaaatatactgtcatttaattataaactactacatgtatgataaaattgttattgtttataataattatttttataaattataaataaaatcaagttgattaactttacattgataacataaatgaaaactatagtcaaaaataaaattacaggtatagtaagctagctaattatatccattgcctgtgtgagtaaacgaagatgacgaatcgatgatacaatattttaaagtgaactgaatcaactcatcttcgcagtcatactattatttagccggctatagcttgctaattgaatttgtatagattgaaacatcatccaatggctccaagtgtcaagtgggattctgttctgctaccctacctgaatcgaaaagataatcaataaagcaaattaatataattttcaccatcatccaaatttatatattgtatgatgtgatgtgaaccccatgatgtctataatatctgttggtactcttttaaattttatgtaaagtgtatgaacaaaattattttctttgtgacattcataacagactggagtttataagttaattaatttattgcccagtcagtattaattaattacgtactaaaccatttttctcagcaaattgtttagttttaataaacaattaatctccaaataagaagttttagtatgccatattttatttttagccgtgagtgattgccaacgattcaaagggtgccctggcgttgattaaatagaaacactcaagtgttgggaagctcttgtcttggatgatccccaagtctttttcttgctggagagttgctttggttacatgcataacctacaaagaagatttcaaatgcctaatattttatggaacttcttccatgactaaaaataaagtaattaatcttaatttttttataagaaaattaacggatattttttttaatatatatgtatgatttgttatatgtgtatacacacgaatatatataaactttatgttgattttttcattagcaatgaaaattagttattttattttctaaagtaatcctgtagtttaaattggactacattactgaaaacaagtacgtgatgaatctttttaataaaatatgttttttttatctttataaatatccttaaatttaatttattatgtcctttatttttatttttttaaaaataaaaataaaagacatgataaattatacaagattaaattgaacttatatgaaaaaaatagttaaacaatgagatatagattggtcttctctgaaaagatggtgatccaactcatataatccattttttagtcattttttcttttcatctctccctccttctttcatcattcttttcttttattttttttaatctcctcgtatttattattgggttcatcaactattaatcccaattaacttaagtaaaagatgctatagatgttaatgttaattgtcgtttatttttatttttatgaatttggttttgataagtttttttaaacaggtccctctcatcacttaatgacttaatgatgatgtgtcagtcagatttatatatatatatatatatatatatatatatttctaggacactaaattatatgatttagtaagaatttaatgttttctttttattcgtgtgagaatcaaattcagatatcatcaattttatattaaggcagaatgcacgtatgtagattagattatgttagttgtttctaattttagtgcttgagaattgagtttcactgtgttataatcataatttgagatcccccaatctattttggtaggatatagccattttgtactcgtcattatgcttcttgctgacgctgatggaaaactaccttcgaatcttcctgttctagagtcggcgaatttccatgtaactcaattttgctatcaaccaagaacactacattctccttctaattccgcagaactgatcataagccaataaatgatagtgaccttattaattaattatgaggcatttggtgtgtgcataattatcttttacacatgcattgcctaattggatggatgtatgtatatatagggaagagaatgctcttcccttgttgtattttactacttccatttcttttgaattggctattacaagaagttttaatttctacagagtcatggtatttcattatttttgcttcatttgtttatattattacatgcttgttccttactgttttcaagtttcttgcatgccacttactacttcatttgcacgcaggaaaatcgtgttgttgacgggaatgtggagaagatgcagcgggaggagagagcagatgatctggttgttcatggaaaagttgatcggaaaggaagaaaagctttgaaacacaaacatggggggatgaaagtttcattgctcgtacttggtaaactaggattgacatatataatatgagttcataaacagtaattaacatgaaaatgcatgtatatacatatactaattaaggtgtggattaattatactacctcgtagtactaattaaaccctgaagtgatggcaagtccttaatttaatgaccacttaccatgtgtatataaaacaatacaagtttggtgtggattaattatactacctcggagtactaattaaaccctaatgtgatggcaagtccttaatttaatgaccactaaccatgtgtatataaaacaatataagtttcattacatattgttgtgtctttaatgtttaaagcaattaattaattaagacaaatggataaccagttacacttactacattggtaaataaattaaaaaatatatttttatgaaatacataaaattatattatttataatttttttttacattcttttataatttttacactatataaatatattttttaaaattttttaaccaatattctaaggagaggtcgacacaagactcattaattaattgtgcacagtgcatatacacctcgttcattaattgatgcagtaagtgttaatttgggtttgcatgggtgcagcggcatttggtatagagaacttagcaactctgtctctagcagtgaacttggtgtcatacttcactggtattatgcattatgaactagcagatgcagctaacatggtcacctattacatgggtgttaattacatgctctccattgtggtggccgttcttgctgatacttggattggtagatacaaatccgttgttatttctggaatcgtcgagtctttggtaagatccaaacttaccttaattccttattgcataataacataagttactaatcgttattggtaaacccaagattatatatattgtttatgtgagtttgaccacatatagcaacgtaatctattttttaaacccacctttatacctattctctttttttttttcgattacctcatttattatttttattactttctttcttttatctctcaaagtatgtatataaggaataataaacctagattcaaaaaaaaaaaaaaaaaaaccgttgactctcaagtatatagtgggaagagatatacatataaagaaaagaggggggaaaataaatgtgaaagattatatgattggaaaacatcaataaaaacgtaaaataaatataaaaagtgaaaaatatatggtgctgatttttctctatcatgctcttgaccaatatatttacatgaatcataatcaagtattataatttatttcttataaaatgtgatatttttaaatatgtgttacatataaaaagtgattgggatgcatgaataggtggttgtctagaatcatctaataatttttctttagtaaatagatatgatttttcttgttcaccaatagttttcactaattatgaaataaaataaaagatatttattggacaaaatatgaaaatattgaagataaaaatgttttttaatagttttaattacttattttgatttttggaaaatatttttaaaactaaaaaggttaccctaaacataatataacagcccagtaacatcaagagctggaacatgaaagagaatttgataattaaacatataaatgaaaaacagtacagtaaacggagatgttaaactttattaaatgacacctttagtttttttttttactctaaatcaattaattttattattaaatttaaattaaattcttttaaagttatatatagttaaataattagtttatactttattattttattttaatgtatgatatattttatatatctgccaatatttaaattaatcatctaaaatttaacaaatatatataattactgaaataataccctatttctctgtcactcggataacagattctagctagggtgattattagacattatataattgcaggtactcatctaatgattaataatgatatcaattatttaatttaatcaaataaaacaaattagataagaagtatttttaagttattatttaacaacttatatttaagtaaaaagtttaatatctttaatagaaaatctcattttaagatcttagttattatttttacgaatcctacaatgttatattactttaagattttatttatattttattttaataatatatctcattttaagattttaaatcattttttgtatatcctacttacactaatagaatacaagtcaattttgtgaaaagagtaaaaattattatttttaaatggatactctaatagtcatatgcactaacattatacattgtccaataaataaatcaattatatatatatatataaaaccaataaacttatcacatataatatacaaatgttttacatattatcttttttctcttaaataaaaccaattgaaagtaagcccaatttatatatgcaactaatttactttaaataattttctaaagcttattcaatcacaagtgcatatatgcatgaatgtgttgtagggactggcattgcttacgatacaggcacgcgtgggtagcctgacaccacccatttgcagcctgtactatgtgagagatgcacattgtgaaaagcttagtgggaagcaagaagcatttctcttcattggcctctacttgttggcctttggtagtgcaggtttgaaggcttccctgccatcacatggtgctgatcaatttgatgaaagagaccccaaagaagcaatgcaaatgtcaagcttcttcaacggtctctttttagcactttgcgttggtggtgcagtcagcttaacatttaatgtgtatatacaagacaataatggatgggtctggggctttgggatctccaccgttgctattgttttgggcaccattatctttgcctctggattgccactataccgaattcatgctgcacatacaacaaacggaatattggagatcattcaggtatacactcttttgcaaaccttgttctgcatgtgctgtatatatttcaatttgaaaatcatatttttttttatactcacgatattagtgtgaaatatttattgattttattgataatcgattaatctccatcgaaaaacctagttgacctctttaagtggctctttcctctccatcatgtttttttcatctacaaaatttaaattcgagactttatgtaaagaaataaagtccagtattacccagactaaaatttgttggttgaaaaagtatatttttgagttcattaggcatgcattatgaaagtaaatttttttatacaaattgttaaccaattaaaattgattcatagtatgacttttaaatagtatattataaaaagacaaattaataaacttttatgaaaaccctttacattgttggtagatatattacttaattctatttttatttacttatagtctgattctgatacaatacaatagttgaagtttttaatttagctcgatattgcaatgatcaagcgcattagttttgaattcttcgcgtctattttccaggtctatgttgctgccattcgcaacagaaaccttccccttcctgctatccaactatatgagattcaacaggacaaagaagccgcagtggaaatagagtatcaaccgcagagatattttcaggttcaatccgaccgtgtctaatatgagtgaaatactatatgttaattgttgatagcttaagtattaaagagtaatgataaatgtatataccatggggattctccacagtgtctacctgtcacacatggctaaccatgtgtgcaaataaatatgattaattttatacaattatcgatttgaatttatcactactagaaaaataggttttaacatcgcctgtttaacatcggttattgggaaaaccgatgttaacgaaaacgcggtggcaaatttgtaaataaatggactttgttaacatcggttttcaagattttaacgtaaaaccgatgttaaccatgtactgttaacatcggttttcaagattcttaacaaaaccgatgttaagaatgtaatgttaacatcggttttgaagattttaatgtaaaaccgatgttaactatgtactgttaacatcggttttcaagattcttaacaaaaccgatgttaaccaagtaatgttaacatcggttttccatatttttaataaaaccgatgttaaactaagatagttaacatcggttttgttattgaaaccgatgttgttatttttataaaacccaccccgccactgattaaacccttcactctcgcgcctacctctgaaaagctctcaccttcactgtgacgacgctttcggtctaaaccctgcactgtcacccactgctcctaccttcgttgtcgtcgctgtcattgttggttccaggttccagtcaccattgtcgcttccagtcaccgctgtcattggcattgttggtgtctttttgaggtcacaactgtcggcacgcagctcccacaaggttagcattcctctgcttccatctattagttggtttgaaatggaactgaatcatatgaaatgctctgtggctcattggcaccagctgaacaacgatttcatgattttcatttgtttccataaattaatgtgttaatgtaccttatttgatatctttaggtgtatgttgaacaaaaggtttaagaaagcaaagatgaaatttgtaaagaagccgtagtgctttaggtttatgttgtgtgggttttttgttgattcgagttttctgttgttggttgtggtgaagggatcaatgatgggttgtaatatatagggcctttttatgtgtgaacatctcgagtatttaatggttaacatattctgctgttgaggtaaatctggaagaatgtaggactctagataaacaacaagagagttgttgggataaccattgtgctttgtttgtcactgttgaggattattagagggcccctgagaaaaccaataaaataaaggcaaaagcaggaccatactaaattgatgctatagatgttgtaagatcataaagcctataaggttactataacatacaaaatgaatatagcatagtacttaaggaacaacgcagtgagtagttgtcataacatacacaaaaagaataaatacatatatactaacaaaacaaggatatgagagccattcgaattagactttgaagttacaatgtacgttcactaagtgcgctataaaatgcctaaactgtgtatgatattcattgtggttctgacattgtgtccgtgtctgcaagttacaatgtatgttcacatgaacctcatgcattgctagatggtgagtgttgaagttcatttcgatatttgttggtgcttaattggttggtttttcatatatccttgtgaactcaatacttgtgtacagttgtctccgtgaggatagagcaatggatgtcaaattcttatttggtttgaattggtagctttagtagtttttgtttgtttggttccattgttccaatgttttagaaataagctatgtctccaagtttgttgacaacatagaagcaaaagaaaaaatacagaaagcacccaaggctaggacagaaagtacataatgatttcttctaaccaagtcattatattagatagtatttactgccatgagtaacttacccctgatgttgcatgattcgtctgatagactgcataatgggttcaatatcctttagaacatcctgctcctcagatgagtaaatgtccaatctctgtccaggtgctctaggcaggcgattcctatttttccagtcgccagcatttgaaccccgaccttgcgaaccttcaaatcgatttttcttaaacgagtctctaccttttccccactgaaaacctttctcattttctgaattagctgaagcaatatgtgattcccatccctgtgaacttgaattttgatttgactgattatattagttttgtttgcttttgattaatataatagatagggtcttaggtcttaaattgttatatgatgaatgaattgaaatgaattgagtaattaagttgatggatctatatgcgtttgttggattgatgataactaataatggtgaaccaattcagacttggtggctgctttgttttggtttatgaagctcgcttgagtgaagacttgaaccagtgctaggaggtgcttgctgaaccaattcagactgtaagtatatgcttctggctttatatgtttatttagtttaatctatttgtattttaagtgaaaaacaagatgtaatcttgctttaggtgatttagacatatatgaagaagaccaagtagatgtattttaagataatgataaggataggcataacattagaagtacatataacatcattgagaaggatatatagagtaagggtagtggattattagtgtgaaccttccaagctggagatagaagtaacacctaccaattgagctgcaagatttacaaataattcaagattgttatttgtttgaattgggaggagctgatgtgctgttaggggtggaatggttggcaggtttgagtgaagttgaggctaactttgagaagctaaccttagctgagggtacagaataggaagatcactttgagggctgaaccagaattgattaaagatgccattagaatgaagttgattaaaggaaccttgttggaagctgatcaagggtttgtagtggagctgaaggcagtagacagagaagagcaaatagaagaaattccagattcaatcgggcaggtattggcagaatttgagcaggtttttaaggaacctcaagggctgtgataggaactggatcagttttagtgaaaacagagaagatattattgaatttgggagcaattcccagctattacaatgtgattttcgaggaatcttaacctccatacaatgtcattggtcccctcctctctactgcttacagtgtatttatattctgtttccaactaataactgatagttagtttcagttatttcaactatccactaactaaaagctcctattccaactaacccactaactaaaagctcctattccaactaacccaccatcatttcacgattcagctctatgcgaagcaaccaaggtgaaattttttcacaagcaacttcttcatcatccatttcatagtaggacttcacaaaatgaacgtcctcttcaattattgtactcatcgggtctggatcataccatacctctgtagcttcagtcacactcctgagagtggtatattctaaagcacagacaaataaggcgttttaattctctttgccacattaatgatttcccttaacctacgaacaccaagagtaacattctttgcactgacactagcatagtggaaagtgttgagagtcatactgcttctgtgtttgttgtcattttaatatgaatactcccctaaatatgacgaacatagcattagtttattgaatagcgcaacccttgacaatgaacgctcctataatgatctgatttgatccttatgattatataaatatatatggtaagtattttgggataatgttgatgttgtcactacattgactaactttctacttctaatgcttgtattttgatttggctcagtcgcttgataggttcccattgtttgcttctcattcccagactttgatttggcgcatgtgtgtcaggtactatgattttaattgtctagtgcaatagtagtaatgaaaggtattattgtgtatgaaccattattatttatgcacaaatcaatgcaatagggtagatcactcttcaccatcatttgtatgtagttgtccgttgcctctgtgtaccatcgtcaccatatcaactgttggacattagcattcaccatcatctcaggtacttacaaatgccttgcatctttttttatcttatgtatgtaaattgttttatgccatttaattagtatgtctatatataaataatgttcattatgagtgaaccgtagtttcccgtttgagattcattacagtgattcttccggacagtttggattaatcattgtattgaatcttgaattgttcgtttggacagtttcggagggcttatatttttttagtatattcatgtttatacgttgtcattcttgtcttaaatatgataaaatttcggtccaatgcatttcactttgttctccgggtgcatacttgattgtggtggaactcatgccaccgctttcatttcgtgtacttggagaccaaagcgaaatgctgccgaaattttgtcatatttaggataaagactcaacgtatagatatgaatatactttaaaaatatgtcttcctgaatgggatagggccacaccttgaattaaaaaagtgaggttttcatgcatggatgaactttgtcaatggatctcagacttggttagcacatggatcgatcttggatgaatgcaagtcgcatcacggttgagtacgaacaaggagttgaaaatttcttacaatttgcctccgaaagaggtccacccgatggggatggaaaatatttctgcccctgtatcaattgtttgaatggtcgaaggcaaacactagaagacatacgggagcatcttctgtgcgatggaattaagaagacttatacgacatggatatggcatggtgagttgacagacacgcagagggtctcgcatactgaaagggttgatgttgacatcggcgatcgactagaggatatgatccgtgatctggggcatgagtcttttcagcaagcacatgcccctatgtatgacacgttggagagtgattcgaaaaagccgttgtatccggggtgcaaggagtcattgacactgttgtctgcggtgttaaatctagtgaatgtgaaggccaaatatgggtggagtgacaaaagcttcagctcactgcttgaggtacttaaggacatgcttccagaggaaaacaccctgcctagcagttactataaggcgaagaagatactttgtccgatgggtatggagtataagaaaattcatgcctgtcctaatgactgcattttgtaccgaaatgaatttgaacaaatgcataaatgccccacgtgtggggtatcacgatacaaagtgaaggatgttgacgaatgtggcagtgatgacagttcagcgaaaggccctcccgcgaaggtgttgtggtatcttccaatcattccaaggtttaagcgtctgtttgctaatgaagatgacgcaaaagaccttacatggcatgcggaggtaagaaactctgatgggatgctccgacatccggcagattcagttcagtggaaaaagtttgatcgtttgtatccggagttcggcaacgagccaagaaatctaaggcttgcacttgctagtgatggaatgaatccgtacggtagtttaagtactcagcacagttcgtggcctgttttgcttgtcatatacaacctgcctccttggttgtgcatgaagcgaaaatacataatgttgtctatgatgatatcaggcccaaaacagcctggaaatgacattgatgtttatctcagtcccttgattgaagacttgacaaacttgtgggatgagggggttgccgtgtttgatgggtatcgaaaggagacattcaagttgcgtgcaatgctattttgtaccattaatgattttcctgcctacggcaatttgagtggatacagtgttaagggccatcatgcatgtcctatctgtgagcaagacacgagttacttgcaactaaaacatggaagaaaaacagtttacactcgccatcgacgttttttgagatcttatcatccttatcggcgattgaaaaaggcatttgatggaagtcaagagcatgaacttgcaccgattccgttaaccggtgagcaggttcttgagcgggttaatgccatccatactgtatttggaaaaacgcaaaagaagcagaaaggtaatacatgcttatggaagaagaggtccatattgtttgagcttccatactggtctgatctagatgttagacattgcctcgatgttatgcatgtggagaaaaatgtgtgtgacagtgtcatcggcacgttgcttaacattcaagggaagacaaaggatggtttgaacactcgtcaagatcttgctgagatgggtatacgtcaacagttacatcctaggtccgatggtaaaaaaatttacttgcctccagcatgccacacattgtcaagaaaggagaagatcagtttttgtcagtgtctacggcgagttaaagtgccacaaggatactcttcaaatattaagagccttgtacagatgacggatttaaaactaacttctttgtaatgcaggctgagtttgatatacctgaagcctcagacgaaaggacaaagaggaagatacttcagacagtgggtgagcggtggaggcagttcaaatccgacttgacaaggaagtgggtcctcgcagaagggaacgcggacgttgccgacgctgtatgcgagaaatacggcatcagtcacgaacagtggacccaattctgtcagagtaggcgagcagcttcctgggaggttagtggttttaccccttttgagtggatatgtgttaaccaaacaattgtccataactatctctatataaccgtgtatttttcataaccctgttttttttcatttatgttgtcatacactcttttatttgctaactttacgtgtcaacttgttacaggatgtgagaaagaaggcccaggcaatccagaggcaaaacaccgcccctcacgtattgtcacgcgggggttacgagttgctcgagaagagattaatggaggaaaagcaacagaagcaagtcgagggagcaactcgtgatgacagcacggagactatcattcatcctccgtcccccgtgcgacgacacgtgaagtggaagctggctcgcacgaagaagagcggcgacatgacttcggaggcggcacgcgagattgctgcgaggattgtaagtaaaacaatacaaatgacatagacatttatttatgtttcgtatcacaactaacaaaacaaatgatctactttacgaattgcaggattccctggaagagcagtccacccagggttcttttgtcgccagtggtcgtcaggatgtcctggctgctgccattggacgaccggagcaccctggacgtgtccgtggtgctggagttggtgtgaccatcacccagtacttcggacccgctgcatcatcctctcggaagtcgaggtcttcatccatggcgcctgaggacttggatcgcctgaaagacaacatcagggccgagctggagcagtccatcactgatcgacttacacagtcgatcacagagagagttacccagcaggtgatgatgagcttcagccagctgcaatcccacatccagtctcaggcagccattcagcctccggaggtacagtcatgtccccttggtgctcgtgtcagcaccaagggaagctgcgtcgatccctcgggcaatgaccctgacacgggtgcatctgacaggcgtgggttgtatgtggatggcaatcctccccgccttgttgcccttggcagagttcatgagggatcgacgactgtgcacaacgtccctcttgccgctggtcaggtaaaggtgagtgttgaggaggttcgcgatgcagacgctcccgtccctgttcccactgacgaggttgtgttagtggggcaggcacttaacactttccttgcctggccgacacatcttgtacagacaattttgacccaggttttgttctttttcccttatgtcttttattttacgaatgatttgtcacatatgaacttaacatgatcgctcacccttggttgttaactgtgtaggataaacaagaagccaagggaccggcgaaacctgtagataaggaggaccatgcttctgatcccttgtaccttctagccctgaccatccctgatcttttcctcagacccttccaggtgccatgggaccctcagatgtttggggtatttaatgaaaacttccccttgtacatgaggcatgaggatatttcggagatcatccatggtggtcagtgtctcagcatctccgttttacagttgtggatgttgtaagtctcttgtaattgacaaattatttggtgaattgttttatattgtagcataacttactttattttcattgcataataggcatatgaatcatttaagtctgcaatccgataaccccgatgtctatggattcctcgagccacagtcgatacagagaactggccaatctcagtttttgatcgaggactatatgaagaaatggatgcagacttcacagaaaaaagtctaccttgcaccctatttgaatgggtaagcataaatgagaatcacaatttattaatgcagcatactaaacttgttcttgacaatgcagttcacattggcaactgatagttatatgtccgaaggccaatgtagtggtgtggttctgttcgttgcataacagacctgataactaccttaaaggaattgttaacaggtaggttctaatttctaacacatttacgttattttttatacttcaaacgtaagttgaacactatgcatacttgtttgtcttaagcagtgctttgaagggactgcatgactctccagcaaataaatcaaaggctacaactaaatggattgcgcttaaagtaagtcttttcattaatcatggtttaagtatcgaattattttttattcatgttcacggtatttgccatttaactttgactttgttttcaatttagtgtaataagcaaataggaagcactgagtgtggctattatgtcatgcattggatgcagacaatagtccaaggagccttcacagatagctgggacatggtaaatacttgtctaatttaaaacaaattgttttgctttacttgtttttgttttgtacttataacatgttttgttatctcatgcagtttttcaatgatcaaagaccattggaaccggacaccatgaaggcaatcagactccaatgggcgaaatattttcttaaatttagacaagatgtattagtagattagggggttcatttctagttttcaaaacaattgtatatatattaatgtttagcatattctttatgtacattaacactttacattggatttgttattggaattattaaattgtgcattgctggtgctgctactggatatttaaattgtgcactgctggttctggatatttaaatttgcaggttgaagaactgctaaaattgaaaaaatagataaaatatttaaaaaaaaaaataaaaaacaacatcggttccaaacaaaaccgatgttaacatatacaacaacatcggttttgaaggaaaaccgatgttgtatgaataaacaacatcggtttttgtaagtgaaccgatgttgtttcttcaaaacaacatcggtttttgttagtgaaccgatgttgtttcttgaaaaaaacatcggttttggagagaaaaccgatgttgatatcattaaaacaacatcggttttctcttagaaaccgatgttgttttcaagaaacaacatcggttcactaacaataaccgatgttgtttattcatacaacatcggttttcctttaaaaccgatgttgttgtattccttgaaactcttttcagcgctttcatgtatgacgactccacatcggttattggtgacaaaccgatgtgctttacatttggtaacatcggttttcaaaaccgatgttaaattctccactttcaacgtcgcctgattcaacatcgctcgagaaccgatgttaaaagtctaaaataaccgatgttgaaagctgcttttctagtagtgtatagtgcttgtatttaattaactatgtctgcaagtggttaatagtatcacgaagttatgaggttattgaaatgtttaacgttggttaactttacctcacaagtcggaaatgattaataggaagggaacttgtatatataattatcattatgtactattgacacaaataattaaatatgtctcacaagtgattaattttcttttgcacaggttcttggacaaagcagctatcataagtagatctaatgagcaacctgagaaccaagagactccaatgttggattaaactttaatgataataaattagaaatgtgaagagtcatatctctaagagaagaaattactcatgtgaaaaatcatgtctttacatgagtcatgtctttaggagaagaagttattcatgtgaagagtcatgtctttaagtttcttataaatagcatctcatgtaaaaggtcaaaagtgtggcttggcagacaattatcggcaaaaaaatttaaataatgctttttaaataacaaattaccaaaatatggcaattcaaaacctatttacaaatctactgttgtcatttgcgttttggtaaaacgtgttaaaacacgtccagcttagacgtgttaaaacacgtcctgggaggacgtacatggtgctcaaacacgtcctgtgtagacgtgaccttgcctcaaacacgtcctgcatggacgtgattaaacacgtcatgcagggacgtgattcaaccccccaacagcctataaatcagccccctcagcccacgtacaatttgccaagttgtggatgttgaattgttgattatagcaattgtaaagctctgaaccaagtaagtgatactatgctcaaatgtttattggttaattacgtggattatgaggtaaatttttgttaattagttaggtaatgtatgacctaggtttaagtgacatagttggtgacatagataattgatattgtagaaatagttattgtgttattgtcatagataattgatattgatgtacaaaattgttattgacttaggttagaaataattacttattataacaaaagttcgatgacctaggttttgattaattgtttatcatgatatggttatacatttttatgtgttacaggcgtgaccgtggtgttgtgttcatcatcattgtgatcttgtagtcgttggtcatatattaaaaatgtctggagatggtgattttgttcgtatcgttttatattataatggtagcaaaactgagagtcgacatggtattgtatttgaaggagagaaaaggggaacacgtatcaaccgcaactcaactattgaagaattgcatgaaaaaatcagaaaaaaattattgtgtacagaagccaatgtatctatcagtatggtcactgcaagaatatggtgtgatgataaatatatcagcatgaaagtaattgacgacgaagacttagaatttgtaataggagaattcttcaaccagtcaagaaaaaatttcttagagttgtacgtggattttggtggactagaggatgtggctttaccaacgaggtcagttgatttcaattattctcgtggagcatcagcatctgctgctccaattgcaaatatgtctatggaagacgaaaatgatcccacttgggttatggacaatgatattgacaatgatgatgatgaaaatatcgcaatggaagatcgtcttcttgctgagaatgctagtgcttcggacaatgatgaggatgatggtcgaagtgcaagacaaatacaagtacattacccagtcgtgagagagcattcaacccaagaacaagaggatgcaggggagtcgcatttaccacaacaatgtcaaggtgtgttaccgaacaagactcgcttacacatatgtttgtttattgtgtatgtattttattgtcatgaatttgagaatttgcatatgtaggtgagggtaatactactttttgggatggaatcccacattacacctacattgattgggattatccgagtgaacaagattctggcagtggttgtggttcaggttcagttgagggtccatgggtattagggaataagttgtttgtgaaacaggaatttgcatcaaaagaagacgtgcaaatggcaatcaagctgaacctcatgaaggagcatcaggaagctatcgtggttgaaagtacgccgagaaagttaatcatgagatgtcgtgcgcatgaccagaattgtccatgaagggttagggtaatcaaaccaacgtacggtgaaagatgggtggttaccaaatgggacggcgatcacaattgcttaaatgatcacatttctcaggaccacagacaacttgatgttaatgttattgtttcactcgtactaggtaagttattggatgagctgataatgataataagtaatgatattattcttattattagtgataacgtgattatttttttattattagggatgataaagcatgatccatcatgttcaattggactagtccaggaaaggataactcattcctatggatacaaagtttcatatagaaaggcatggtatgcaaagcagaaaacaatggcaattatctacgatgattgggaggaatcatatgcatttttgtcgaggtggtgtgaatacatgcttcacttttcaccaggttcgatttatcaaattcagacaaaaaattattatgtggctcatagaatcgttcgtggaaaacgcgtgttccagcgcattttttggaccttcagacaatgttgcgaggctttcaatttttgtaagccggttattcaaattgatggcactcatttatatggcaagtacaaaggaaaattgttgattgccacagctcaggatggaaacaatgagtgtttgccaattgcatttgccattgttgaaggtgagacgttggaagcttgggaattctttctggataacattcgctcgcatgttacaaagaagacaaatctttgtctgatttctgataggcatcaaagcatattgtctgcagttgagatgcaccccgggtggcaaccaccgcatgcttatcacgtcttttgcctccgtcatattgcgagcaattttaatcaaaagttcagagatgaaaaattgaagaaagcggtcatgactttaggtatggttaaaaactcatgtattgatttttcatgtataactaaattttaatgttatttaatttctgtgcagggtatacgccttctattgttgattttgacatagcctttgcaaattttcgtgatgtgagtcctgaggttgccaactggattgatagcatcccgaaggaaaagtggacacgtgcatatgatgtcgagggacgcaggtatggacatatgacaacaaatttggcggagtcagtaaacaggattttgaaaggtgcaagaaacatgccaataaccgcgttggttaagcacacttacagcagattggtggaatattttgtttgcagaggccgatcggctcttaatgaattgcaaggtccttatccacattgcaaaaatgtggttgctatgttgaaggccaatgagaccagtgctactggtcattatgttcgtgcatataacgttgaacgatctgtatttgaggttgacgatggttatgacaaatcgtactcggtaaacctccctgagcggttctgtcagtgtgggaaatttaaggcgttcaagtatccttgtagtcatgctgcagcagccgcgttacatgttcgtcagtcaccggcacaatatgtggatgacgtcttccttatatcaaacttggtacaagcttattcattttcgtggcagccaattggtaatgagcaggcaattccacctagtgatgatccagtggtcataccagacagagaatatttgcgtgcaaagggtcgtccaaagtcaactagaatacgcaatgagatggacgaagttgaagctagtcaaagtcgtattaagtgtggtatatgcagattacctggtcataaccgtcgaaattgtcctagtcgtccatcatgaattggttatgttcttgtcaatgttttgctttatgttgttgtattttgtaatgaacatttgaaccgtaaaccaaacgtccattgaaatcactcatgtgaaattcatatatgctacgatgagtttcagacatcaaaacgcaattgacattaatggtaacatagtgatggaaacctaatacaataacagaccgtacaaacaattggaactagagagataaacccaaaaaagttgaacatcgaaaaagcaaaacaacgaaccctactaagaacaacaattcaaacatgaaaatgacgaaactaatcataatttggatggtcttgtgcagcggacatgtcatcttccagcagttcgattaccggtttattaaaggtagctaagatttctattggagagaaacgcttccagtaattagattctaccaacaccttcagtacatcttcatcatttttcagttttattatttcatattcgaccatgttttctgaatattttgcgtgacctggttgtctgaagaacaattgtctgacaacctgtgattcgtgaattccataagggggaactcctaccggcgcaacttgcttgattatatgcttcagtgtttccatattgcatcctgaaggaatttgaaatcttactggattttttccagtaaacgagtaacccaaaaaattgtctgttcgtggtatgttccacttgccgttgtaatacaacagtgcatcatgagtaggagtcatggtggctcgaagtaggttgaggacaccatcaggtgttctggttatcatacataacaattcgataggaccaacagatgggagtttttcatggcacaccaacatagtgcaaacatcatcatcatttttcaattgcagtgaatggaaaaaaagattgttacctgtattaatggatgtttgtcgatagtaaatttcatccacagactggtcatttgttagcagaagggtgttgtgcattctactcttgagtgactgaaaggaacactcatcgggaattcgcattggtatcggagtatgacatacgaaagaaacaccagtttcattctgtaagattgatccattcggaaaaataaacgctaatttggaattaccaatattttgagagcaggtttcacctaagaaggccatcgtattgaggttgagtttcggttgtggaggtatgttgtgtggatgattaaacaccactgtgatgtatatataaccgtgttaagccctgactgtgtggggggtcaccacttgcgcctggatggggcgtgagtaaacagctgtcgtggttgtgttgtcaatgtcacatgacagaccagtgaaatttaatgtctacagtaaaaaggaccacaacgtgttgtcaatcgtccccggtgttgtcaatgtcattttacaaatcagacgtacttattggctacagtatagaggaccacaaagtgttgtcctgcattgatcaaagcggtagggctctttcacgtgggccaaaggaccacaaagtgttgtcctgcattgatcaaagcggtacgtgttttagacgtacttattaggcgataaataaatgtccataatgaaaacatgtttaacaattacatagtcaaatacaaaaaaaaaggaaactaaagtaaataacaaaatataatgtctacgaaggaggaggccactgataatgacgggcctgacgatctgacaatctgcgtctaccacgtccatgcgaatgctgaccagcaacataatatggcggtggagtgtcctcgactggcatatctggacgataatatgtctggcctgcatcaaaattaatttcaccatacaggtcatccgaagctctaccaccccagtcatgataccctgaagcactcgtccctgcctcatccccgaatgccgtactcgtccctgcctgatccccgaatgccaccgacactggactcactgcgtacgcaggctggctctctgtgaacatcggtgcgggctccggccgatagcatgtatcagcctctgcctgggtagggtcgtaatatgtctgatgaaccccgtactgatgaccgatgttgggaggcctgatccatccaggcatgcatggcgtgggggcatgaataggctcgggaacaggtgtaataggacgtcgacggcgtcctaaccctcgaccctctctcgcacgacgccaaacgtcgagcgataactggggctcatccggaagctgggactgcggtgcctctagacctggctcagtcacccgagctgactcactgaaaacatcaatcagacgacctacttcgtcatgcacatactccagaccgtagtttccaaattgttcaggcgtcgtcacaaaatacaaactctccagaccatcagcctgtaagccacaacatagttactaaaacaactatatcaaataatgaaataataaatattgtgttctagtaacttaccgagcgtcctaatctggccccctgcttcgtcacatatcgcttcccagaaagtctataccaaaccatgtactcatggttcggtgacatcagaccatatattggaggaggcacgtcaacgtgttcacccctcctatcccatctctgtataaactttctgagcttacgagcccaattttcttgggctttaccccgaagggtataatcatgaacccccttcagtttcccagccctacgaggaattggttgatcccgtccgaattgcctcatgcatcgatcgggctgtgaatactcagcaatgtgaaaacaaattataggtgtcctagccatccacagacgtcgtgtctcagcagatgcacccataaaatcgtaatcaccgtaaggttgccaaaccacctacataattaaaacatctgtatcaggcagttgcatattcacatccatttaaaactgaacattatttatttaaaaagacatacctcatgtctacgtaggctgtctagcctctcccgaaaaaatgtcaatgagttcgggctgaagcgacgtaagaaattaaatctaatacacagattaaacattcaagcgttaattgtagcacgcataaatacacagccattctagtaatacacaataaacatacctgtgtccgaagtggcggtctggctcgaacacagctggcaatgggggagcaatcggtggaaatctgagccatgcccaaatctgaagcaaaacagtacacccaccgatgtcttttctatcggggtctgtgcattcgcacaactgtctaaacaagtttgccagaaccgcaaacccccaactatatgaaccaatgtcagcaaagtcaccagcaagtaaggatatgtaccgacatcctacaaagctcccccctgatttgtcgcataggagccaggctcctaacatccgagcaatgtgagccttcgtgaagtatatctcattctgagggttcccggcaacaaattgccatgcacgatacactctgtcgaagtatgataatctcaaactgccggtgcataactcgacgtccggatcagggccgttaccaaaaacctggttacacaattcggaacaatctgtgtaggtccgtccagtaacggctcgcccatcagtaggcaatcctagaatacctgcaacatcttccagggtgatcgtcatctcaccctggggcatatggaaagtgtgtgtctctggcctccaacgctcaaccagagcactgataagagcaggatcaatctgcaaaatcgaagtaacttatcgatttatgcgtttcaaatacattatgtttgaaaccatcgatttcacaattacaatttcatcagattaagttaacaacattcgttaatcgatacctgcataaacctcatacgagccacatgtatgaagtcagcctcagtcaaatactgggctactgtgtccgggatatcgtcgtgttggggtccaccaatgagtctacctgcgcgacgtatcttcagctctctctgtgtgtcctcattccacactgcctgtgaaatatgagtgcgttgcctccgccttcgaagtacatcccatctatatggaccgggaagaacatgcgttgtgggatcggtaggctcatgctcccggtcagagccagaacgaggtgactcagatgacgacgactcagccataataatatgctacacattttataattatattataatattttacctaatttcaaatacaaattatttaattcgctaactacaaattatttttacacttcaatacatgtatctaggtcactatctgataatctacttcgtaatctaggtcactatctaataatctaactcaccaacgataaaaaggtctatttttgttctggtcacaagtgtttcaatatgctatataccttaatgtcatcacaattagtcatctcatcaatattaactgtgtatgtcaacaattttcattaaaaaaatatataaaatacaagctcattttaacaaaagaattgtatttaatttcttttctaaaatttaattgaattaataataattaacctaggtcctaatctaagtcactatctaataatactctaagtcactaaataacaatttaagtaacaaactaacaactaacaactaacaattaacctaggtcactaactaactaactaactatttaacaatctaagtcactaattaaaccctaacaactaactaacctagtaacaatttaagtcactaactaataatcaacctaggtcctaaacacattttggcttttgatatctcatcttgtaatatttattatgttttacaaatacattttggtattcaatatgataaatatatcattattaatggaatttaaaatttaagaatgccaaataaacctaaacctaggtcctaaccctaaacctatgtcatcaaccctaaacccactatttgtttcttaaaccctaaatatatgttataacctacgtaccctaaactaagtaactaactaacctactaatataatatatatcatgcaatttcaaaaattaactaaccttacctcacctcacccacctacttcatagtctaagacactaactaataatctaataacactaacaatttaagtcactaactagtaacattgtaacatcaataaaataaagaatatttcaacatgacttacttgatttatacagcttctttgcaccttcttccttgcaccaacccaaagcctttccttgcaccaagccttttgcagagagaatgcagagaaaaaaaatttttgagggagagagagtagcaagtgcagtgtgggatggctgggggggtatttgtacaggtagctgaatcacgtccctgtgtggcgtgaatggtgcttggtcacgtccacacaggacgtgaatggtcctctaacacgtctctgcacgacgtgaataaagccaggacgcgtccctgcaggacgtgaatggagccaagacacgccgctcctagacgtgatgcaggctctgttacgtctgccatggacgtgaatcaacacgccttccacacccgtgaccatgttccagtcgcgcccatgtgtgacgtgaataaacacgttccctcacagcgcaaatgacagcattagatccgtatatacttttcaaattgccatattttggtaatttgttatttaaataacattattttaattttttgccgacaattatctaaatacatcagaagtattctaccaaagagattgttgtgtgtttgtgcgagtgcaccagtgtgtgtgaggacctgtgataccacaaattggtatcagagcattgagaaactggagagtgggccaagtagtagtctgccattaccccgccttacaaaggctaattacgaaaattggagtatccaaatgaaagcccttttgggagcccatgatagttgggaggttgtccatggtggtttcgaggaaccaacatccacagcaggatatacggcagcgcagaacaagacattgaaggagacgaggttgaaagacaaaggggcattgtacatgttattccgggctgttgatgattccgggtttgagaagattgctggtgcaacgacttcaaaggaggtgtgggacatacttgcaaatgtctacaagggtgccgatcgagtcagacaggttcgacttcaaactctccgtggagagttggaaggaatgaaaatgaaggaaggagaaggggtatccggtttcatcacccgggtccagaccgtggtaaatcaactaaacagaaatggagaggtgttgtccgattccagagtggtggagaaaattctgaggtctctcactgacgacttcgagaatgttgtatgtgcgattgaggagtcaaaggacctagcaacgctcaccgttgacgaacttgctggttccttggaggcgtatgaacaaagaaagaaaaagaagaaagaagagtcactagagcaagcactccagacaaaagcttcaatcaaggacgaaaaggtactctattctcaaaacttccgaggaagaggacgtggctatggaggtcgaggagatggtctaggtagtaaaggccgcggtcaagaaggaaggaataaggagtatgctgaatcaagtcggcagaattggcgaggccgaggtcgtggaagaggccgacattcaaatcaatcaaatgtagaatgttttaaatgcggaaagtatggacattactcgagagattgcaactcggacagatgttacaattgtggtcgagtcggacattttgcgaaggattgtcgagatgaaagaagaaatgaaacttcaaaccttgttacagaaggagaagtaagagatggaggaattctgatgatgactagaagtgaagtcaaccagggatccgagatggaatggtatctagacactggtgcaagcaatcatatgtgtgggcataaacatttgttcagtaatctgagacaaatagatgctggacatgtttcgtttggagatgcttcaaaggttgatgcaaaggccgaggtacgatttgtttcttatagaaagatggacgaattgtgcgcatccgagatgtctattacgtgcccgatctaaaaagtaatattcttagggtggaagagaggattcaaaattctagaaaagggtggagaggattcttgtttgtgtctccagcattaggctgttgagagagcgtctccgagaggttgagagcaagttgagagcgtttccaccattgttgttggtgaggttgagtgtctccggctgaaggccgttgagagtgattgtaaccattattattgagaatagtggattgttctagactaggtcccgtgggttttccttttgaaggttttctcccacataaagctattgttggttgagtctggtgactccccagtgtttgtggttggttgaggtgttgctcccaacagagaaggagattgtgtgtttaatcccatcaaagtaagacagtccaaccgagatccgtgtagataataagtcagcaatcgagttagctaagaacctggtcaatcacgaaaggagcaagcatattgacgtcagatttcacttcatccgagatcaagtaaaaggaaagaaggtggaattacttcatgtggcaagccgagatcaagtcggagatgttttcacgaagccattaccgacattactgctggaaaattgtaagatgttggggatgaaagacggaagaaatatttaaagtttatagggggattttgttggattaaactttaataatagtaaattagaaatgtgaagagtcatatccctaggagaagaagttactcatgtgaaaagtcatgtctgtaggagaagaaattactcatgtgaagagtcatgtctttaggagaagaagttactcatgtgaagagtcatgtctttaagtttcttataaatagcatctcatgtaaaatgccaaaagtgtggcttggcagacaattatctaaatacatcagaagtattctaccaaagagattgttgtgtgtttgtgcgagtgcaccagtgtgtgtgtgaggacctgtgataccacatccaaacccgtggaaactatgcagagttacccaagtagaaaatgccaaaatcattctaagcatgctcccaatattatgctgctcaatcataatgaccctttgcttagcacaactccaaaccttctctattcaacaaggctcaaccatgaacaccaggatcgccaagcattttaacatcccacctgcatctataccaatcatcccagttgccttcttaattgttttcgtccctttctatgatcgcgtttgtgttccttttctacgtaaattcaccggtactcccaccggcattacacacttgcaacgcataggagtaggcctaatactctcttccatctccatggaagttgcagcaatcatagaggtcaaaagaaaaggagttgctagagacaacaacatgcttgattccttgccagtattacagccattgccaattagtatatcctggatttcttttcagtattttgtatttggcatagctgacatgtttacctacgtggggcttcttgagtttttctattcagaggcaccaaaaagccttaaatccacagcaacatgctttctctggtgtgctatggcccttggctattttctaagttccataatggtgacaattgtgaatagtgcaaccaagaatattactgcaagtggaggttggttagaagggaacaatatcaacagaaaccatctgaacttgttctacttactcctttccatattgagcttgatcaacttctttgtctatttgttcgtttcaaagaggtacaactacaggcctcaacaccctacagttactggtggcaattcagatcgaggaagtgaatattgggagataaaggtttagcttaatatgattaatatggaacagtgaagatttagtgggtacgttgtacttttcttcgtttgtcaaaaatgtatgtgagtaaatagatagaggactgcacctttaattattttccttgtaatgtcttgagttaattagagctatagtttccaagaaatccatgtgaagtttttattttacctctgcctttggttacatttgatttctattttcacttttgctagaaatttttaaaattcattaaaagttgtattttaaaaccaataataattgtacaattaaatataaaatagttattttgaaaatcaatacattagaatttaataagattaacttatcctaaatagaaaaggactcatatatctaattaatgtcttaaagatttttttggattaatatgtagtgtaaagttcatttgtataggttatgtgtgatttattaatgaagatctccctaatgttttatccattgttttcctaaaatcttttttttttttttgacaaaacctaacatctatttgatcataattttgatccatgattaattgattaaagcttattaacctatttttaaggtttaaatatagttattaattcctcaattttttttgaaaagttactttttattcaattgattcacggtttcataatttataatgatttttaatcaccaaaatttatttttaaaattttttaaaaataattttgacaattttaaaccgacaaaatatttaactctatgatttgatggtcattgtttacacattgtgttagttttgaagaaaaagatagatataaaattgtcataatttttaacaaattaagagtgttttaaactatcataaatcattttaaaaaattatgacagtgacaaattgtgaggtattcaaatagaacttcagttttgcaatattagagtattataattatgacagcgacaagttccggagggagaacggaaagagactttttggaatgaccgaagcaaaaacagaagcggctatatatgcagaatcccttcatcgtgcaagcaaaagatattgcttcgtctgagccaagtaaaccagtactgttacacaagaaatgatagttgaaacttgaaagtactgaaaaacctaaatgtgtatcaataatatgatgccaaaataaaaacatcatctaaataccaaggatcagacaaaagggcaaataacatgttgcaccccaatggtcagctttgttcataataataaataaataaataacaacttttcaagtcagtaagtagaacatctaatttaaaagctaaaacacgtaaaaaaattctataggcgttagggttcacaactgtacagaaaatcatacaaagtgtcgtgagagcagcaaaggaaccaaaagcttagaagattttatttccgtgttttttgaccgaattgaccttagaagtagagacgggatattttcagtcgctgatgaacaaatatttgtcaattgcaatttgagtagttctttcattaaatagttctaacagattttattttatttaaaattttgtttgattgtgaggtattaaaatagaacttcagttttgcaatattatagtattgtaattctgcatatgaataagttttggccataacatatttatttttcattattgtatcccctgtatcattcttacttgcaattagcacatttaagggttcaactcttattataactcaccaattttgaatgttcaacataatttgtccgactaattaaaaaagatataatttatccgtacattacacggaaaatcgtattaatttatcttaaatttatattttttttccaaattatcatgataattaatgttcctttttcttttttaattgcttgacaacacattctctcttattttaattagcaatattctattataaaaataattaatataagaaatattataaattaaatcttataaaaataaacattattttaaatttagatcttctaaataaaaatataagtatttaaaaatattgtgtataaataaagtatacaagttgttatttgattatctttaattgatggtcaagaggattctcttggttaaaaaagacacatatttgatggtaaattttaaattgggatcttagaccactttttgatggatcagtgagaagctttttgttcgagttgactgtgtgattgtggttttatttatgacaacaggaaattttttcctattagatcactttttgatggaccccatagcgccacttagtattgaaaatcttttaagataatgagatcttaaataattttaatgagtctcacatggactccactttaaatatttaaaaatttattaaattaattaaataattaattttaattaataaaatatgaaaaaaaatataaatattaataaaatatgtaattaattttaacttttaattttattttatttatttttttcttcttttggtcctatcatataaaaaaatcatttttttttaatttcatgcatatcttcaatgtttttgtgaagatctggatctatggatctatacgtgaagatcttattttcttctttagggtaatctcccaaagttgctcttattgtaaactctctcccattatcgtcagttctgatgaattaaaaaatctttaattgatcatggtatattgacgtcttaagtgaggagtgggagagaatagagtatatacccggaatatgccttatgccacatcacatggttcgatccaagcataactaaccaacacagtcgattccaaatcctaatcctaatcctaatcaatctggttccagtttgagttgcgattatggcaagccaggcggtgtattcggtgtgggcgattccaccggaagacgtgggcgccagatgcgccaacctcatgaccgccctccgatccgagttcggtgggccccacttccacccccatatcaccgtcgtcggagccatcaaactcaccccggaagacgccgtgaccaagctccgatcggcgtgccaagccctgaggcccttccacgtcaccgtggaccgcgtggccgccggcagcttcttctaccagtgcgtgtatctcctactccgccccgagcctcacctcctcgaaaccagcgcacattgctgcacccacttcggttacaccaattccactcgttagtgactttctctttctttaattaattattcttcgttttcgaaagaaactttagttcgcgaatgttgatgattgattcctttgcagcttacatgccacacttgagtcttctatacggagatttgagcgatgaagagaagcggaaggcgcaagagagggctaatgctatcgatgacacgctcgctggcttgacctttcagattacgcgccttgccttatacaaaacggacactgaggacaaaacgctcaaatcttgggagaaaattgctgaatgcactctcactccaaattagtagcttcttaacttcaatattagcaaaatccacaactctgataaagtttttggttttctacactctctagctgtcttcttagtctttctgagtgctactgctatgtgcttactgcttaccaatttccaaactcatatacataatgatgtcaaataataaggcactagtacttcttgttgtttctactttttttaggcccataattatgaaggcattattaatctgcataagttttgctgtgggtaaaagattgttagacacccttggaatgtagacatcaacatagcgattggaagagagaagagatgagtaattgttatgattagtgatgtgatttgataagaagtattaaagggtagtgccaatcagtggcgaatccagaaaaaattatttatgtcggcacgcacacttagtggcaagagtttgaggtgtctctgaaattttttttttaaataaaatttaattaggtccagaatgggtagtaaatgatccgcattatggtaaaacacaaaacgaaaagaacaaatgcaatgctagctattgtttccaggatccatgaattttgcaatttcattaacaaggttacggaaaagattcaaaggaatgtggtcacggcctcagaggaccaaggtcatggttcatgcattttggaatttaaaaaagtacccaatatgtataaaaatctcataatagaatttgcaaattgagtatttgcaaattttcagcgtccaaatgactattttgttgtaacaacactattgacaattagaattatggcagttacatacatacagtaagttttgttgtggcaagagaaatgcttgcaacaaaatctcttgtactctagtttcaacctagtattttctaatggctcaaattcatgtaagtctcattaaatatatacatctcatttctcatttggtaggtctcatcctcaagctaatcacactaagttataacaatatacgtgcatactgcagctctgtacagttgtgtaatcaaatattgttatactagtttgattatatatatgccaagagccttaatacaagtagcaacactaggtctctttaggtattgcttcatgcaccaaagccgcttttgcttcactagagctttctttatccttaaaataccccaaggagggcagggctaatagaagagtaaaaggtttccatgagatatatttgtttgaaaaaaaaataaacaaaactattagacctgtattataccagaagtctccgttgtggaaggtggtagtatggattagataaagatgttgtcacagcggaacaacagagcagttgcaatgatgttggatggggcaaagctccatgtggttcaatcaggtttatggttcctaaaataacctcaccagtccattaaaaccaggatgccatgaataagaactgtacactgtttcttatgcacgagccgaagcaaaaaagaaaaaagaaaaaaaaaaactgttaatctcaaagaacagaatatatattctttttaagtacttaatcaacacttaccatgttttttcatctcttttctcttatcacatcatataacctataatacttatatatattttttttctcttttttttttctctctctccctaggtgtcatataacatattgaatgtttatagattattttccaatctcagaatatcccatttggcatatggcgacaattcttgtttctgttttgtttatatatctgtcgagttctaaatataaccaatcttctataaagtttaaactaatttgacataaaacattttttagatatttcttccttttttttctttgaccaattaatttaaatatcaacagaatcttcaaaattcaattcgtcaatcacgtggggtgtagcagtgtggcacgttacttgaactgtcattattgtgatgattaacacaatcgataatttcgttatccccacatctttcatatacaaaaaaaatgacaacatgatgattaataactgcggctaccgtaatttaaactctttattagttaactgctaaaccaagcccaaatgcccaatcactgaaatcaacattgatgacttatgtagacctaaaacagcatagttagcaaacggacagtaagaagggaataaatggttaaacagatcaaacttatattagtagtacaattttccatatcaccaaaagaaaaagtagtaaaattttccaattaaaatcaatattacatctggtttcacgcttccatttttggttactagatgaaattagcaattactaagatgacataataattttgattggagaaccactataataatacttaatgggtactattactacatttaaaatttgtactaattaatcaattctaccgtatgaactataattgcggagtgttggggtgttggtggtgctttctcggcttttttacacaaatgagtaaatttaaaataaaaaaaacactgtagattttgaaaatattacgggtatgagcaagtcgtgttttaaaacactatttcatctagagaaagacgtattttaaaataagactttaaaaactcactttttttaaaataaaaaaataatgaaatcacgttaacaactttagtattttttttcttttttaaatattgaagttgtttattaaatcacaaatttaatctttttttttcttttttctttcttttaaaaaatattgaagtcgattgttaaatcatgactttagttttttttttctttttttttttttaatttgaaatatgtaagtggtgtttattttttatgccataggtattggtgttgtgtatggaatatattatgcgtataattgtatattatttttattatttataagtgtgataattatttaatgagtatatttaatttgttgaaatattaattattttttaaaatagtagtaatataaaaatagaaaattagtcatagaaatgtaataaaaattaacatgaaatatattataaatacatggaaaataaaataattattgggaggatgtcccatatgttagtcttttcatcaattgttgttgacttaatatttcaaatataaaaaaaataaaaagaaagactaaagtcatgataacaaataatttcaatattataaacttttttttactaaagtcatgatttaacaaacgactttaatattttttttaaaaaaaaagactaaattcatgattataatcacgacttttatattttttaaaaataaaataatacttgaaatcatcttttaaaatacgattttagtatttttttaattcaattttctaagattgtattttaaaacatgactttctttatataaaatcatattttaaaatacgacttataatattttcaaaatttatcattcctgtaattttttaaaaataaattaccgatttatgtaaaaaaaagcctgctttctcggtgtccatggaccatggctaatatataaggggtggaacttaatacaccagcaaaaaggctaatacacccagactttttttaaaatggcaattctacccttcgttggttataacaaaagctgaggaccttctcttgctgccattaacgagttgaagcttccgttgagtgcattgtgagtgggaggtgttggttgtggtcgtttaagctggtggtggttgcctttgacgctgttgggttggtcggagtgacagacggtggtggagcaactgtcggtgaaggtaagttgcgtttttttgcatttacggattagctaatccgtataagatctacggattagtaaatccgcacatattgtaggctttgtgtgatccgtatggaccatacggattgtatgatccgtatggaccatacggattgattaatccgtacgattaatacggattgatcaatccgtatggtccatacggatcatacaatccgtatggtatgtacggattgatcaatccgtattattaatacggattgatcaatccgtatatgccatacggattgtatgatccgtatgttgaaaaaaatggaaattaattattaaaatgtgattttaattattaaaaattgtgttcttaatctacgatatctgttcgtgttgtgatttatgtcagtttgttgtcatttgtgaagatgaacgacgatgagtggatgtatgatgctataatgtccgaagaaattgacatgaatgaagatatcggagataaaccgagtgcatttgaaaaagctgattgttcagtcgattgctctgcagcattcaatacttgtgaggtatgtctattatttataaatttgttactgtttattaacaagtgatttatggaacttaatcgtcattattattgatttgtgtaggtgtttacttctcgtgatgaactattaaaatgggctagaagggttgcgtatgagaatggttttgtagccgtgataatgaggtcggacatacatactggaaagaagggaagaacttcatttgttttgattggttgtgagagaagtggaaagtatagagcgttcaataaaaacatggtgcccacagtgactagcacgagaaaatgcaattgtccgtttagattgaaagcgaaaccagtaccggaaggtgaagggtggatggtgaaattattatgtggcactcataatcatggtttggcaaactcattatgtggacatccgtatgctggtcgactgacagaggaagagaaggttgtagtgcatgatatgacacgatcgatggtgaagcctaagaatattctccttactttgaaagagcataatccgaataattgtacatccttgaagcaagtaatgaatgcacgatatacatatcgtacccgtatcagagaaggtaatagtgaattgcaacacttgatgaagcttctaggacgagatatgtacattcattggcatagagtgaaggatgaaaatgtcattcgtgacctgttttggacccatccagatgcagtgaagttgacaaatgcatataatgttgttttcctggtagacagcacatacaaaacaaacaggtacagacttccgttattggacattgttggtgtcatcctactggcatcacgttctcagctgcgtttgctttattagaagctgaacgtgtagacaatgttgtttgggccctagaacgttttagaggcatgtttattaaaactgaatttttcccaaaagtcattgtcactgatagagatttagcattgatgagtgcaattacaactgtgttccctatgtctaccaatttactttgtcggttccacattggaaaaaatgtgaaggcaaaatgtaaaacttttatccgacagagtaacgcatgggactatgtgatggaagcctgggaaagtcttgtggactgtggtaatgagaatgaatttggtgattgtatggcaaagtttgacattgcgtgttctccatggcctgcgtttgttgattacgtgaaaaccacatggctcaatccacacaaagaaaaatttgttacagcgtggaccaaacaatttatgcatttgggtaacacaacaactaacaggttagcaaatctttaagttttgtaaagttattgcttttatattgtggttgtaggggatagtttgtgactgttaccattggattgcagggtcgagtcagcacattcgacattaaagaggctattgcagaatagcctaggcgacctctgtagtgtatgggatgcaatgcacaacatgctgaccttgcaacatactgagattagggcatcattggagagaagcacacatgtggtgggtcatgtgtttaaagtaacactgtataaacgactgattggaatggtgtccaggtatgctttaaaccaattagctgctgagtatgagcgagtaccttacgcaggcaaaagcaaaaaacgttgtggatgtgttatgagaactacgcatggactgccttgtgcatgtgagctagctaagtatgttcttgggtccatacctattgatgctgttgatttgttttggcggaggttaagttttgaagatcaaggtgtggatgagggccaggtggacataagtggagagatggaagccatatctatgcgttttaataaccttgatttttgtgggaaggtcactttaaagtcaaaacttagagaaattgcatatcctgacaaaaactcaatgcgtcctccgcctgaaaaagtgaaaacaaaaggtgcgcaaaagagacaagtttcgcaacacgcgaggtcaaccaagcgggatccatcttactgggagcatgtggacgaattacattctgttcagaatagttgttcgacaccaaaacatcctgcaacatcttcggctgatgacagccatacaaagacgaggcctccgatgctggatcagtttcatacattcatgcatgatttcattgtggacattattgatgttaaagctgatggtaactgtggatttcgtgttattgcggctttactaggttacggtgaagagtcatggtctctggttcgcaatcatttgcttaaagaactttcacaatggtctggtgaatacatagcattgtttggtggctttgacagatttgagcaattgaaacggtccctacttgttgatgggttgtcaaaggtaactactatgttactatgtttgtacgtatacgttaacctaacttattatatttacagttaagtggttttcatgtcaggttacaattgataagtggatggatatcaccgatctggggtacgtcattgcatcacggtataaccttgttcttgtttctctgtctctcaaacaaagcatgacgttctttcctttaagaagccaaccacctgcagatgtcaatgttcatcgggtaatttgtattggacatgtgtttggaaatcattttgttcaggtataagttgttgaacgtagtttatcgccaaaagactcttaacaaatataataataaataagtttatgatggttattgtttcaggttgcattgaaagctggatgtcctattccgccacctgcgttgttatggtcaaggaattgttacaatgttgcaaatcaatggatagttccttaccaatatagaatagaagcttatagacaacttcagcatatccgtacggattatgttgacttacgactttagttaatattgtaatattgaagttgatattgttgacaaattatgaatcttgtttaatgatgtacttggatggtattgttgacaaattataagcgtgttttcatgacaagcgataactcaaaagaaacataatattataatgttaagtgaacaacaatgtcgaagtacatgaagtacaatgtccaactaaaataaagttcacatatggtgaagtacaataacaagtacgataaatataataataaataaaatgcatccaaaagcatctctactgctgcctctgcctggtccgtctctgtcgctgatagacacatcgttcatcggtcacggaacgagatatacgtagtaggcgctcagtagcggcataggcatcagtcccacgtgtaaccatgcgtaggtctatcatctcctgtaagccgcgcgctatcctatcgaatgtagcctgaacaaatgtcaaaataataacggttaccattctaacagtacatatatttcaaaacaaacatttcaacaatgctgcacataccaatgcatggcgaggtacgtcggatataggtggatctgcctctgggtcatcagtagcagcatgcggagggtcctcaacaatgtgtgactctggtgccgggtgcctaacaggatcaccaacctcaacgggtctcatatatggatgcgatacgcggaaaaaccagtccatgtaacccaccactgtctgactagcatgacaggcaacctcagtggtggatgctaagtgatccccaaactgtatccatgcctcgtcaatctcatctgtggatggcacgtctactaagtgcatgtctggaatatcctgaacatacccgtactgcctcaggaccctgcccggaagatgtctgacaatgaccggtccgcagcgaatatgaccagagaagagggaaatgatgtcgaagtctctatgtggacgatgatcgacataaggagtccaacaaacatcctccatgaccaacctatctagtcgtctacgataggtggtcataggtaatgcctgggcaggcttccaccgacaggctcgtggttgggactcctgataatcctgaacagcagtgacatttcccacagtggggaaatgttcatagatccaacactagaagccaacataccaacattagtttgttatcagcagaagcagaaaacataactacatatattaaacacaatgacaacagtcaaaccattacctgaagtaaggtgatataaccagcaagatgcttgccgtggtgctgacatgcataactgaggttagcatacatgtgaacaagtgctgccacaccccaagcatatcctcctgcgtcctctaaatcacgaaaggcctccaagaacaccacactgatatgtgtagcgctcttgttggcaaacagcgtgcacccaacaagatgaagtaagtaggctctggctgctacaatccagctcctctcctcgcacttcactgcatagatgtctcgcagccaagacaaacgcacatatgccccatggcattgctgcatctcagctccagcatcttcaggggtgacgttcaacaagtcaacaagcaagtgaacgccctgtccaacgtcgatcgtgtcgtacgacaacaaatgtccctcaatggggatatgcaacagcgacgccacgtcatccaaggtgatactcagctcccccacaggtagatgaaagctgctcgtctcagggtgccacctctccacaaaagccgacagcaaacccctgtcacctgtctcgactgagcatgcaatcaacggggctaagccggtaccagccaccagtccttctatctcgagtgcaggccgcccaaatttatgaacctttcttccgtgggatgccaatttcaactcaggacgttcctacaatcattttacatcactgtcagtcttgtacttcaaaaatcaaaccaaatacaataataaaataagtacctgtccttcccacactcgcagagcgacgtgatcagcatactgtgtcaaaactgacgtgtcctgtggaccacctggataaccttcgaattcatcacctcccccctctgtggaagggatatcaggctccacatgttggtcctcaagaccaccaccgtcatccaaaccagcccccaaatgcaagtctcgagccggagggtcaacaacagctgccggagggtcaacaacagctgcccctggcctttgtcttctgacagatgccgtgggcctacgacgctgaggggctgcatcttcattcccactgttctctctaccagatcctctgtctacaccacgacctaaggcccgatgtcctcctcgtgttctagccataatctggtatacaacaataacaatatggaattcagctctcagtcaaatacaaagatatcaaatataatgggtgataacaatatcatcaccattaagctgtaaaaacacaatcaacaaaacaacgacaaagccaaccatcatcacaaccacttcattgatgaaatcatctatataattaccaaagccaaccatataaggcacagctaataacaatattatcacacataggttggtcaaacgataatgaacacacaaaccaatcacagacctaaccatcatcaccactaccaaaggcaacacaaccatcatgaccattaaccaaaatacgatcattcatgcaccatttactctcctatctaactcccttcccatgatatacttgtgatcatcactaccaaaggcaactaaagtgatatactagcataacaccaataaggcacaactaataattcatgcaaccatgttgaccactaccaaaacatattgcctttatatatgctacacatacaataagaatgtgccttttgtgcagtccatgttttcatattgaatataatgtatgggccacaattcaaatttctatcaatcccacaatgactattaacatcaatactacaacgtgtaatcatctaatctaagtcaaataagtttcctagcaactcaaatatgtacaataaccaataaaagacacttcacttaatcataaaatcacagataatacaattctaacactgcacggatcagttaatccgtatcaggaatacggattagccaatccgtgaaattcatacggatcagttaatccgtaaacacttcacggattggctaatccgtatgcctgatacggattaactaatccgtacagtgtttacggattagacaatccgtgaagttcatacggattaactgatccttatgaacttcacggattgcctaatccgtaaacactgtacggattagttaatccgtatcaggcaaacggattagccaatccgtgcgatacccaacagtccccgatagttgctacatacctcgcgcggcggccggaacagataaccacctccctcagtcgacgaacaaccaccaatgtaggcttacacgcgtcggaactgatgaaaccaatgacgagcacagccaacctcaacgaaatcgcaacagagcagggtgtatgcgcagaatccgtaaagccttcaatggtaacagtggtaatgaagggtttaacactagggacatttaaggaaattcactgtgcattttaaaaaaagtctgggtgtattagcctttttgctggtgtattaagttccacccatatataagtaacatgtgcttgatatgtaacggcctttcaatgctatgtttaacatgttttgtgccacaatgagtgatgaggtacaatccatgaatagaccaaactgtacccactaggcaatttcacttgctatgtccaatcaagtgaaatatgtgggagctgcatgcctagttggggcgtggatggatggtaaactcaggttgggataagctaccttctgtaacaatgcacaaaaaaggaattaaatcaaatagccaagatcaaatcaactattgttagaaatgactccatttgtcgtatcactcgattttagcacacaaaattattcttccattgaataaaattaggatgaaacaatccatcctaatcaacgttcaggaattaacgctgtgttcgatttgcaagacagaaataagagacaaacaacggtaatggggactgagtttggttggcatgattttggagagagagtaaagttataatttgtggggtttatagcttaaaatttccgtctttggaataggggtagcactaagtgggagtttaaaattttcggtaaaaagataatagtaacctttaaaaatcaattgtttatgcaaaaaaaaataaatagattttcttttttggctatcatacccatatgtgataaaatgggatatccgacccaattccggtctaatgtgagatatgggctataatgggtcgaacaaaaaaaatttgaatttaatttaagcttaaataacgaaacttaagttttgtgaaaggctgatttttgtggactcagcctgcattaaactatgattgatttgatataaaatttacatttaatttgaactaaaaaaattaaactcaaattctagattttagaagatggatttggacggctagcccaatccatttttgtcacctttactcatccctactcatataaacacaataatatttttgtctctatttaattctttctttcccatatatatcaaactcctttacaatattatttttactctatttctcacatatttttcttaaaccagactaccaaacatatatcttcatttctctttttttttttttaaattatctattttctattttcatcaattatatttctctcttctaaatcaaatacaacctaagagatgaaattgtattgtaaaccattacagtactgtttcgcacatagataatcaaattgaaattatctactaacatttatgtctagcataaaaaacattcatatttgtttatatgagacgaatatacattcttgaaaataaggtttgatttattttagattttaacaacaaacgatgttgttgctcataaagaagaagaaaattgttaattttacgagactttttaaaaattctttgagattttaaatatggatagtaattgtcattctgcataagcttatcaaggtatgttaaaatacaaaactaaaattggagcatgcatataaaataaagtatgaaacaaaaaaatgaaaatgaaaattttaattttaattaaataaattgaaagtgtaatatctaatcataaattatgctataattaagaattattaattttataataactactataaaagtcttatttaaaaatgagtttttattagttaacggtgtattataactaaattatttaaaattttaaatatgtataataattgtcgttgtgtaaaaacttgtcaaaatatgtttattttatacaataacaagaatatgaggattaaatcctcagctatttatcctaaccctcgtcactaacccagtggattactttacttatcaaagtatgttaaggataaaaaaaaaatgattttacttagatcatgcaaataatatcagtataatgaataagggtgacctacattacttgtcagcaaacaagaagcagcagaagaaggaggtgagtagatgaattaaatcaggttgtcacattcacatggcagttgcattgccttcaacttttgggtcaccgcatagaggtacaatgtgctgtcaatgacaatgaggacgaaagatgtccaacagtataactaatacaaattccaagattaaacatacatatttaaagagaggtttaatatggtagtcattgtaaatattagtagaagatagaaccttcaaaaaggactaaaagaatgaaaccgcgttgttcatgattgtcagtttgttagaaaagttaatacgatacttggaattaagaatgagaattgtttgaagcccttgtatgtagaatacccaaaatggaaaatttggaacatgatgcattaaatatgtgtagaagttaaaggaaatttatacttggaagaacacgcctattttcattttctatctttttttcccactctaatttgtaattataaaaaacgccttatttttcttttgttccctatttttaaaaccttatataattgtttctcataatttattttaaaaacaaaaaattaatatttttgtaactaattacattaatggtataaatcgcaactatgtatccagaattcaaactctagagttttgattatgttgaataatttcaggttaattaataattgttcaaaaggtttatttcacaattgtaaataatgttaaataaaacaaaagtaaaaaaaaaaatttagagaataataattgtgtatatttttttcaataggaatagtttatttataggtataaaatataattaagaaaattacaaaagataaatatatataaataaattaaagaaaaattataaaataatgaaatatatggacaatcacaaataaattattcataacactaatcaatataaatataacaataaatatcataaataattatctttgtttcctattttaaaattattaattaatatgtatataattatttagattgcatatactcaaaaatcatttgtaatattctaataatatttaacaaatggaattacctgaacatatattaacaaataaaatattaacaataacatattacattatcttaccagaattagatacacatataaaaataatataggcaagaataatcatgttaggatatcacataaaaattgagataaactaatatacacaaattgagattttaataaatagtaaaatgtcgcattcttcaagaatgaaaatttccttttttttcttgcactatttttccatttctagtgagaaagaatcaatcttttctattctcattcttcaagaattaattttttttccttttttattttttgtattgtttttccacttctagtggagagaaaaaaatcttcaatttttattttattttataaggtcttcaagactttttacaaaaatatttttagaatttctttatttaatagtgctttcaagacacattatgtctgaataaatttcatatttatgtaaataatataactatacacattatagttataaataatatgagttgggagatgagaatagtgttaccttgaaatgtgaattaaaaagaatatgacattctctaggataagatcaaattataataaaattcataggcctcaaccattgcaacattatttttctcacatggagtgagatcattattttttattttcacttttacattattttctcatttcggatgagaataatatcctaaaaaattccttcttgatagtatctttaagactctcaaatgatcaaattcacaattgcttaaatagaacccaaatattataccaaactcatagtatgaataacaaaattagagagagaaaaaatctagccttgaaatatgagtctaaaagaacaattttctccaatttttacatgattttttcttataagttacaataccaattgtcaataacccatggaagaaagacaatcatgtaaataaggtgttaaataaaatataattcaaataagagaaaaataaagaagaagcgaacacaagagtttaaagataatgatatatatatatatatatattctttctaataggagtaacatatttataagtacaaaaataattgaaaaattacataagataaatataaataaggaaagattataaaagacaatgaaagatatgaagaatcacaaatagattattcataacaaataatttattaaactttttttataaaaaaattcatttgacattgtgaaaaaaaacttttatacttacgtagtaaattaagacactagatatcaattaacaacatactatattattctttactttagatttttttttttaaaattaaactgaattttaagaggaaaaacaatgtttacacaacatactcattagttatggacaaggttaaattttttaaaaaactgtctgcaacaacaattacaatggccacatcaaaaattgagtcatatttgttcacaattttcacaatatcaagaaataatggccacaaaaccaccaccacaatttaaaacctcacacaagatacacgagagaaaagaggttccactgactgaatcatttcatggaatatctcttgttctaagtttccaacttcgctccacgtgtctttcaccccattaataattgtttccagatctctctctcatgccctacttccctcactagctagtgcatgaatttcttaaaagtaaaaaaaaaaaaatgttaacaaaattaaattaatttgattcacctcaagtgattcaataaataaaaacaaaagaaacaaagaaaagtgaataaaatatacacagatgcagatgagtgtgtgtatacatacacaatttgtttcatatatgcataaaccattatggaagaaagactgtttttcactttataaatacccatttttggtcactttgcttgcattttctgatatcttctgcctgatctgctaagtggacaaaagtgagaaaaatatatgcacactattcttctaagggctggaacttgctctcctgtcctgaatataacttctccattttgtttgctcaacaggttggtggagcaaaatactgaagcatcatctaaaatgccttctgaatggttcacctctttttggggtaaatttttcccttgaatccaagattttgcaacacatgaactagattgcaatttgcaaactagccattacaagcaaatgaaactttttgaagctaaatatatataaatagctaatgatttaaatgttggactaagttcttgaggggtgaagaggttgttccaagctttcattttcttctacatttcttttcagattcttccccaacctgacaaaaatagctgaaagatcaaaatttacttatgtgttttgtcaagaaatactttttgtgtgtgtgtgtgtgtgtgtgtgtgtgtgtgtgtttatacgaggacaataaaatgataagatcttctacttgattcagcttgattaagtccttgagggatattccaagcttccatttcctcttctttccttttcagattcttcacctgacaaaaatagctgaaagatcaaaatttacttatgtgttttgtcaagatatactttgtgtgtgtgtttatatgaggacaataaaatgatgtgatctttttacttgattcagcttaaaaacatggctcttccaaaccaatccatgtcatcagagtctccccagagaaagatgggaaggggtaagattgagatcaagaggattgagaacaccaccagtcgacaagttaccttctgcaagcgcagaaatggcttgctcaagaaggcatatgagttatctgtgctttgtgatgcagaggttgctctaattgtcttttcaaaccgtggccgcctctatgaatatgctaataacaggtacctgcttttcttcaatctcttcataaatattttgggaacattgaatttatataattttgctcatgcaaaaaaatcttctgaaggagttaagcacaaagagcctaattacttttgtgatgcagttagaatatggagttaatttttcctctttgttttctgtaatcacggttcccttgtctttttttttttttttttttttttgtctttaacactcatcaagaattgtttcttctattttggcctttttccttctatgagcttttaagctcattctcctcttttttcttcttctgtttatgaaaattattttcttagttcttgatttggtgggcacatagatctggtgtaccatatagacatagaagcactatggttgttaactagtagcaagaggaaaggatttggggatgttatgaaggtctgtgagatcagccaatccctagaactcataaactttctgtttcctttttcctctttcccttctctctctttctttactcatctaaaagctaaagctgtcatctttccattagcccaatttccttagtaacaaagccagttgattagacaaaaaagaaaaagaatgacagtacactttcaacaaattgtcaatgactgaatgagttaaactggaataaagaaacgagtaaaaaaaaataaaaatggatttttgtaacccatcacaacaagatcttctcagaaacattgacatttaaaaaaatcaaagtacactttcaacaaattgtcaatgactcaatgtgttaaactggcataaagaaacgagttaaaaaaaaataaaaatggctttttgtaacctatcacaataaattcttctcagaaacattgacatttgacacccacttgcaagatctcgcactgggttaaaaataaccttagaaattagggttttattagggactaatacatgagctgagcatagctaattagcaaagggagaagaaaaaagaaagaaaccgttttctcttctcagcatgaccagaaaatagtcaaagttaatctcttaatatttattgctcgttgattttccccattttaggaaatggagtttggcaactatggttagggctttaaggaaaataaagggtggctctagactaggattttcttttttgtcttggttggaagaatctttgaacacgtcacacgtgatttttcagttcttgacttttgaaaaaagagtttaaccaagtcatactcggaagatggaattggtatctctttaactcttgcatctgaaccctaaagttggatcttctacaacacccctcctatgggaaactctctcttcagcatagagtaaaaaaattcttttacatagtttggaaaacagcaaaagacaatgaaagagagtcatgaaacaatgagggtccaaaacgctgcatcatcataatttcactggtagcttttggagcctctgcatttgctcaagatcttgaactttacatatttgtgaaagttgtagtctgagaaagaaaaataagggttttttaagctgaatgagagagagagagagagagaggtaaatggggggcagggagccaatgagagagttctgagcattttggcttcttccatgcaaaggaaagtgtacaactactgcttttgcttgctgaaaatttgcagtagctgaaatgaacggctgtgatgtacacatactttaacacagaaaagactatttttttaaacaatatatggtatcagattcagtaaatgtgacttaaaaatcttgcacgaaatttagatggttagaaatcgaggtgagcaatgaggtgtggttgagagcattatccactgtgagatgcgtttccttgaagtggcagagaaaaaaataggtctagaaatggttgaaccaatcatattgtgggaacctgtgccaccgtggcagcagcagccaatcagtggctcgaggatattaaggtatcagttcattgcaatactgaaaaggttttcttcttttcttttcctttttcatccctaattttctattattattattatggaaactaaatcattttgttattttaagattttatttttatcacatctaatcagactttgactccagtcgaggtttctgaataatgagatcatgtgatgtttattacttttgtgaatttagttgcgtttgaggttcggttaactgaaccagttggatgatttgacattaatttcaaccttggacaagctctatggttaacctcaaattaatatggaacacagttgttcctttttaatttcttttatttttgtttctttttatttacgcacaaagtaagaaaccgagttaacttgaaagattcggatgaagacgttctagagactgaaatcaaatgtatcccttagagttagtgataaaatgataatactgattttaaaattagttgtttgcatttatagaatttaaagttattaatcagttgtgaatttctagaatttactaactacatttttattactagttatttacactttattattctattgcactataaactgtagaagatatgaatcctattaataaagctgacagcttcacgaaagagataaaataaacgaataaaggaatataaattcaaaagatgtgatatatataataattcattaataaagtttagcttatattataactttcattaataatgttatcctagtaatttatacactcaaaccaagagataaatgtagtttatgtgacaatattcctctttctcttcaaccgtgcaaggaaaattttcagatttccaattactaattaccctcaacagggttaaggatacaagattaaaaaaaaaaaaactggattgggtttatgcactttagaaggtaaagtgcacaaatcctaatcattcatattagtaaatgatttagataaacacaccttaattaaaattgccacatcaaatttttctttaacgaaataaaacttattaaattaaaatagaaaataaaaaaattattttggcttgcttcacctaatcatcttcattggttacacagaagaaaagcctccgatacaattgttacaaattgttcttcttaatctgcagctttatcttaaaatttcttactactcttaattggaattttttcttccaaccacttatccagcaatgtagaagccaataacggaagaaggaaaaaataaatcatttgcctaagagccaagtagcaaccagaaattagtagctatcaagaaaagaattagtacgagcctaaatagtggcccctctgtccagaagatgtccagcatgacctcattggtcgatgcaactagttttttttttttttttttttttcattttgtgataagcacatatggaatcaattgagagagagagaaatcacgttgaagacatggaggaaaaaaaattcagataaagcaagatttagaataacaatgccgcaacaattgtttttagggtttttgttcttttgtatatcatgaagatgatcaagtgaagcacacgagaatattttctatttttgtttaatgataaaaaatctatacggcaattttaagcaattttaattgaggtgtatcaatctaaatcatttattaatatgaatggttaggatttgtgcattttatcctctaaagtgcaacatgcactttagaggagtccaaccggggctagtcataactaaagctagtgcactgtttgatttagctaagattctcaaaaaatccttttataatcaattaagttgcaggggttaataataatcacaaggaacctaaagcctttaacataactatcctagttaggatgattacaaattttgtaagactaaggcagcctacaagttattaagattaaatatttgtttatcattcagaacttttttattttccaaaaaaatttgttactggagaaggagattgaatgctataccggaaatttggtcgtcaatcatgttctttgacttttgggttatgcttatataatcttgtaacaggacaacttgtgaatctatataaggtttttttataataagggtcatactcttgcagattattagataaaaaaataagtaattttctgtgcttatataatgttctttcacaataatcagaaaaagtcctttatcacttagatgatgccactgtcatatcacttagcacaatgaatataatttgtaaataatcttactgttattatagcgtcaaagcttcaattgagaggtacaagaaagcaagttcagattcatctactggtggacgatcagcttctgaggctaatgctcaggtattaattcattattccttctctacattttttcaagagaaactttatttgaaactaattaaacaatgatagatacattaagttaatatcatgcagaaaaggaatttgaatgtaattgcaatgaattataaactaacatttttaaccatgatttcaaatctcagttttacgagcaagaagctgccaaactgcgtgtgcaaataagcaatctgcagaatcacaataggcaagttgcattagtaaaaatttcactacaatatcgaagggaaaaaaaaaacatatgaagagatctcaagtattatttcaatatttagtaaaaatgttttgaatcgcagtcaaatgatgggtgagggtttgagcaacatgaatggcaaggatctcaaaaacctagagactaaattagaaaaaggaatcagcaaaattcgttccaagaaggtatttgtatttctagtaacaagaagtttctttctatgattttgaaagaataaagtatgcagatttactatgttgatctaattttatcctttcttcctttgtttgcatgtgctacttcccaaacacctacatcagaatgagctgctatttgcagaaattgagcacatgaagaagagggtaaatgttttccttgtattcttattttaatttctaaggtcatttttttttttttgcatttattatctaagtggcttccattacaatttaatcaagtttcttaagtttagcccaatggtctctagttaagatttcacaaatatctgtattagggctctacaattgtttttcatattctgtttaagtttcctcttggtcaaatttggagatttccaaagatggtagtgaggatatatagatcattccattgcatgagtactattcatgatagcttgagtagctcctagagcctaaagatgaatcatcttaaaaagatgccactcaataaggtctaaggcccccactcaataagatctagaaagaaaaatgaaaatttgtaaggattcaatcttgtgtataaaatataaatgtgaattgtagctgcaaatgttgtcacaaataaataaaacagaattagatcatataattattaatttgagtttggaattttttatttatacactttataatattatagactatagatatatttagtttaatttattttatactatttctacgcaaacatttttcaatattttcaagtagtttttcgagagaaaaaataaatttaatctgaatgttattaaacccctttaaataaataaaaacacaattgcgcaataaaatatcaattttaaagcaaatatgtgagacactgataactaaccatatcacaatattgtagacggtgcatgtaaagtttgacattttgtatatgatgaaactttggcttagactatatgttcatccttatccctaaataaatctatatataggtgcctataattttaatctgtgttttttttttggggagacggggtatacaaaatttcttctacagtgactttcaaagtatacatagtaactaatatgtacatttcacaggagatacacttgcacaatgacaaccagcttcttagagcaaaggtttgtcattctatcatcaatctacactctttataaatatatgacgtttgtattgtagtttcattatcaattttcttttttttgagtgtgtagatagcaggtgagaggagtcaccataatgttaacgggttgtctggaagcataagctatgaatcgatgcaatctcagtttgactctcgcggcttcttccaagtgactggattacaacctaataatcactatgtcggacaagacaacatgtcccttcaatatgtgtaagtttctcccttgctaggtttcacattcattctataacttgatatgtatttgtttttaattccttaatgttcaaatcactagttactacctattaacaaatctcataagagtcatcatagctttatatggtcatatcatagttccattgggaaagcagatatagaataaatgaagcaaatagttttatggatagatattaacttgtcctatgcataatatggtggaaaaaagggtaaaaaatgtgaagcacaagcccaaccaaggggtttagttgagtagtgttcgtctgagttcaatttctataaataaataaaaacacaaaaaaaaaaaattataacaaatgaatctttcaagatacaaagggacatgcttgtggacatagttgttcttcacacaaaagagtcaactacaattatgatttcagaaaatcccaatagtcatagcatgtcaattaaaaaaggtaataataggagaattgaacctctagtaaagatgattcgagaaagaaattgggatttgtataaatgaaggaaaaaaaacatatggctaaagaattgctttagttggctataaataaatgttttctcaacataaattgaaatttagtttcaataatagcttgagttagcacatatatacccgtaccatgacttgatttcgtaaaacaaagagaagagataatggggagtgaatgagtaaacaagtcctaatataaaatacaaaatatatacagaaccgaactaatttgcattgcaaaagttatgttttaatattcaagttattttgtccgttgacaggcatatttgtgtgtcccatggagacttgacttattgtatatttttaattaatgaacaaacataaatctaatgcttgttcttttatcttgtactctatcttgtgcagttgaagagtttaagcttaagaaggagaaagacttagatttcctattgtttgtatttgacgtctagtatgatatatagaaatgctaaagcctaggaagtatgcagaactcaatggagggaattcatttaagtattcccctcagtactatgttatgggctatttagtatgtatacatgtactctgagtacagagatttgcaccatgtcatattttgtcaacgtttgtatacttttcatatttctcctgtaataggcttctatatatgtctatttcatatttcacttactatgaattcaagatcttactcatacatgcacctgttcttgagtatgatttttttaggaagatcattgttatctgtgcaaagtatccaccacattttgaatatgattaatttaagatttaaatacattttagtctttgtcatttatcatttttttatttttttccttacaatttttttacttgttttgttttttagataattaacgcattaaacagtaaaaaaaatattatctaaaatgttataaaaacaaaaaataaaacaaacatttttgtagagactaaaaaaaattataagaacaaaatgcaaaaaaaataaattataagaactaaaaatatatttaagtacccaggctaatttccagcattgttaagcatatgcaagtgcatatcggcatccactgtaaattgcaatcttcgttgcttcaacatctacatactcagctctatgagaaagcttgaaaggaatgttgtgatcgacaaccataatgtttctttcctgttagtaaaaattgttccaagggcaaaagcattaacaaagtgagaaaataaaactggaaaaaaaaataaaagcactcaagtatctgcaatatcagtataatatgtattatgtgtatttgaatgctaattaatcaagtttgttagattaaaagttgatatatatatatatatatatatatatatatatatatatatgcgcaagggtaagtggttatggattcgagtccggaaacagtctttttgcatatggaagggtaaggttgcgtataatatccctcccccttatttgcgcataacatggatcctccggacaatagagtagtaatttttttatatatgcaaggataagactactacttataatatttctcctttttatctacgcgtaacgtggaacatacggataatgaagtatgtaatttatatatatatatatatatatattgtgggagagagagacgatctttgaactttttaaaatatataaaaacaatgacacgagctgatcaaaagggtcgtactgatatgcaagatggaaaggtggaatgttagacaagataaaagctcaaaatagacaagcagggtaagaagaatgattaaactcagtgagaagtgtcacatgaaaataagcgaattgagaaaggctactgtgagtgtgaccatcctacttagcttcactgcctgacaaagtcactttcctgatacagtagtaagcacttctctaacagcttgtttgagtattagagcctcacagaagtgttctaagcttcatgtggttatattcaaagcttataaataggattacaatcaattaaaacactgttgggcaagttgagaagccatagaacagttataaactgttttctgccactctgctcaaacaaactgagtagcatgaaacttttttcttgtgtagtgtatccctgctctgcagtaacttttgaccctttcctagagtgttttccagtgtagatatgatacacattcaacaacttatacaacaattcatgcaacattatttttttgcgtctatctctctccatcatcctatcatttatcatttattatatttcaaattcaatttttcctctctttttctctattggttgtacattttgttgtacaagtatcatttctcattgttttaattcagtctgtttgttgagctctatctttttttcactcttccattatttatttatacctttgacattgtgaccgttagggcaattgaatttcttaaaactcgttttcagactcagcttgatgattaaccaaatcatcactttagttaaattttttagaaggatactattttgcaggtgtttatttcaggtataattaggtttcaagtattgggttgctgtagcgaatacatctcattcttataggtctacaacctttatttatatcttaatcttggtgataaccggttataaccataaatccaaaaaactaacaattaacatttaccaaaaaaaaaacaataaatccaaaataaattaaacataattaatgcctatgcatgaataccactatatacaacaacagcacaaaaactaagaaagatactggatagttttcactttccttgagggtaagtggcccttggcaactctgatttctgtagattcttttttttttaaacttcaatttctgtgattagttagaaaagatctggaacaaattaactactattcaaactatcataaagaagttcttgatctgcaggaacaaaagtacaccaatacataatgacatgaaatagctatatataacaccacaatattgcaaatgaaattccaataattgattgcaattaatctccttcggctacaatatgattattataagttctagcaaaaatcaggtacatccttaaataaatatggttgtaagagtttccatcttcattttaacttaacaagatgacagatatccattgggtgcgccatggttggaatgggagcattataagcacttcttgcactgagttggttggccatctcagtaggatgaaatgcatcaaaaaatacgtgtaggtttctgttcttgcatggctcctcattagggatacactgcccattcggccccactttgcagcacataacagtttctgaaatccctacatggggccaccaacgaaagttaatatatttaataaacaacatatctatttgcttcaattttttaaaacgatatgatcataattgcattaacataatagtaaaaattgaagacatgcatgtgcatccttttggtcatagtttcaattatacaaattcaatttagccaatcttttgtggaaagtacaaagatacattatatatgcattttacaagctttctgctacgaggaaataacaaatacgttaaaaccattttagatgaataagtgtttgaatatatacaggcacagtaaattatacaaaatccatacttgctggtatatcatatacatcaattgaatcttagtactactataattttggctatgaaaagaagaagaaaaaaaaaattgttaccttgtaactttgaggcgtgtaatgagaccacagcactattaatgaagataaatttggcatcaggtaattctttattgaaacgatcaactactggtttaagcttatcattaaaaatgagtgctgctgtattttcctcgtcaacacatattgacccatttttcccatgaatagagatttcatgcggaatgcagcctataagccccaggcctatcaaaacaaacttccttgccccaagtgcgtgcaaatcctgcacatagaaacaacaaaagtagataacaaaccattaatttggtgcatcatgtatattataaatgttacttatattacgtctgatcctttttttaagaaacaagttttagtgtattttatactaaaacttgtttctgataatacctttttctagaatttgaagtaaaataatacctttaaattccttgcatattcttggacaagggccacagcatactgttcaggagaatacgttcgacttgatgggtaatgctccggtaagaagtagttgtttaagtagtcattgctgcctatattcacataatataagcacttatttaggtggtggtgtgcttggtcagggcctccaagtttctgagtgatttgggaaactatgactttatgattttgcaactgcaatcccaagctaatatcctcacccttcaattacaaattaagtaaagtaaggtttttgctccattagcatgaggataaattaaactccgcctatgtgtgtatgcatgcatggcctgtcccaagccaggataaaggaggagggttggcgtcaggagttgcgaaccggccataaaaaattagctattcttatgtgatgaacctttatgatatttcgttggggcgttcccttcatagcgacgcgttacatcggaccccggatgtatcgaaaaaagagctagggtcctcgccacaaggcaaggcgctacatcgaccccgggatgtagtgaaaaagatgctagggtccatgccgaaaggcaaggcgccaggtcttcacccggatttggtgacaagaaggcaagggtcccaacacgcagatgggcgagcgtggcgggcaaacacagcccaggggtttagaatgaaattgggaagctggaacataggaacattaacgggtaaactgagggagttagcagatgtttttgccagaaggaaagtgaatattgcttgcttgcaagaaactaagtgggttggagaaaaggccaaggaagtggagggcacaggttttaagttgtggtacacaggtaatatcaagagccgcaatggagttggaattatgatcgatagaagttacagagataaagtcgttgatgtaaaaaggaaaggcgataggattatgatggttaagcttgtagtcggggatcttatcgtaaatatcatcagtgtgtatgcacctcaagtgggattattatcagatgaaaagacccatttttgggaagacttggaagaggttctaagagggataccacgagaagagaagattttcctaggaggcgatctaaatgggcatgttggtaaaaacaatggaggttttgatagaattcatggtgggtttgggtatgggactagaaatgagactggagaagatgtcttgaacattgcactagcctatgatttgatgctagcgaacactttttttcggaaaagggagtctcatcttatcacgtatcatagtggccaaaatcgcagtcaaattgatttctttatggctagacgggaagatagatattcatgtattgactgtaaggtctatcctggagaatgtgtggcgacacaacataagttggttgttctagatgttaggttcaacaaagttcttaatttgaggaagaaggatcaaaatccaaggataagatggtggaagctaaaggaggagaaacaattagaatttatggaaaatatgttgcgtgaaggaccgtgggagtgtatcggagaaactaatgaaatttggaataagatggctgtatgtgttcataatgtgggaaggagggtgttaggtgaaagcaagggaaacagagtttttacaaaggaaacatggtggtggaatggagaggtgcaaaaggctattaaacagaagaaggaatgctttagatctttgcataaatgtcctaatgaggagaatttgcaaaaatttagagtagcgagaaaagatgcaaagaaagcagtgcgagaagctagaggaaaagtttttgatgatttgtataaaaatcttgggagcaaagatggggaaaaaggtatttataaacttgcaaagatgagagataagaagagtaaagatctcacccaagttagatgtatcaaggatgaaaatcaaaaacttttggtaagggatgaagatgtaagtgaaagatggttacactactttaacaatctttttaatggaaatggtgacaagagtgaggtggaattggaggacgtttctgatgatctgaatagaagatttgtgcgcagaattaatacatatgaggttaaagaggctttaaagaggatgaagaataataaagcgttaggacctgatgatgtccctattgaggtgtggaggggattgggagatgtggcaataaaatggttaaccaatctttttaataggattcttcaaacaaacaagatgcctgatgcttggaggaaaagtatgcttgtgcctatttacaaaaacaagggagatattcaaaattgttcaaactatagaggcatcaaacttatgagccatactatgaagttgtgggagagagttattgaacatcgtctaaggagggagaccaagatttcagtaaatcaatttggatttatgccaggaagatgtaccatggaagctattttcctgatgagacaattgatggaaaggtatagagaaaggaaaaaagacttacatatggtgttcatagatctcgagaaagcatatgatagagtcccacggaaagtcttatggtggactcttgagaagaaaaaggtagcattaaagtatattaatgcaatcaaagatatgtatgatggggctaccacatgtgtgaaagcttgtaatggaacatcaaggtatttccctatcacggtcggtgtccaccaaggttcagctcttagtccttatctctttgccttagtgatggatgaactaacgaaagatattcaagaagaagtgccgtggtgcatgctctttgcagatgatgtagtacttattgatgagaccaaagatggcgttaatagaaaattggaattgtggagaagcactttggagtctaaaggattcaaggtaagtaggagcaagacggagtatatgaagtgtgagttttcgaggattaaagacggtgagcaagacacagtgcatctgcttgggcaagaggtacccaagaaagacgtttttagatatttgggatcaatgttgcaaaaaggtggggagatcgatgaggatgtaagtcatagaattaaagcagggtggatgaaatggcggagtgcatcggggtttttgtgtgaccgcaagattcctattaagctaaaaggaaaattctatagaacagctgttagaccggcaatgctttatggagcggaatgctggccagcacataggcaacatgagcataaaatagaggtagcagaaatgaggatgttaaggtggatgtgcggatacacgaagatggataagataagaaatgaggatattcgacgaaaggtatcagtggtaccagtatgtgaaaagatgagagagcatagattgagatggtttgggcatgttatgagacgaccattagatgctcctgttagaacaagagtatgttaccaagagctagatacaaagagaggtagaggtcgaccaaaacttacctggggaaaggtagttaaacaagacctaatggagtgggatttagattggcggacggtatgtcttaggacggagtggagaaaagctataagtctgatggagggttaaaccctttagtagttctatgttccagttgtttcctgttttaattcttttcttcctcttttctcttctcctctcaccattcttttatatttaactctgtttctctcttttgctttattttcgatttatcattgggttcatctaccaccgaccccaattaatttgggttaaaggtgctgttgatgttgatgttaatgttgagcatgaggataaattaagtaatacatccatgatatattgtgtatatgaacctaatatcaatagctgattttctaataaaaaattgaaattactttacctttaaagtgagttttagcttgtgagttgttcaatttaaagaaatcagatccaattaagtaagtgaacatgtgatttgatttaatgcatgaaacaaatgacacatcacacaaatcatgacaaaatcacaaaggcatatatctcaaaaccaaattataggtaagatgtatatatataaattagatatatatagtaaaagagtttgaaatataccaaatgtaacccggtctcgttgcgaatccccgctgaaccggatgcataattcacgcctttgagtatgtctgaaccaccggtatttgcaaagggtgggataagattttccaatcccaaaagctcagctgcaataacataattttatattgaataaaatgaaattttaattaactgaaaactcatatatacatcaaaataacatgaaaacaaatcatattaatctatggaatttattctattcaagttatcaaacttaacgggacaaaatcattgtttgtcttattagaattgagtttggattcgttaacaaggattcaaattctagtgtttttatggaaaaaagaagagatctcttactaaaaataatttctgaagagatcaattatggataaaaccggtaaaacatcttttgcacctataatccaaaaaacttgatgtgacaaaattaaagatcacatgtctactttcattaaccgtgtctcaactctcaagctcttcaaatataactccagacaaaatagtcttgtccatgcccaattgcaaccatgtgaaagaaagatatacatgttgagaattgaattattactgattatatcaactgaagtacggccgttggtaaatcttccagtggggccaagtggaaaatcaatcccataaggcaagttattaactttggcatctgtatttagattgttgttgtttccactatcagataaagagtctccaaaaatgaaaagacaaggcacttggggcttcccaacaacacaataatgttgcatgtatgttgcactgaagaaaaaaatcaccactaaccataacttggtttcataatccatatcaaagaaaaatattaagagggcgaagttcagatccaaaatattaggggtccaaacacaagggtgactagataacatatatatatatatatatatatatatatataaatggagagagacgtgagagaaaggaaggtatgacccagtttaatttgtggagaaattcgttgaaataatttatctatgtgacacattgtaaggccatatgttgattttagtaagtgaatttcatgcacacactattagaaaatgactggagcctacatacggcagaaactagaatttcgccaagccatgagattgtaactatctcaagttttcaatttggacaaaatttaaatgaagttccttatgagtgatttttatttattttttttacttgtttaagaaatttggaggtaaaaggaggggaaaatgagggagggttaaaatcactaccttttaatttctatctccctctcaatgttggtagagtaggaaaatgatttataattttaagactgtgacttaaattattttaatattttattgtatccctttttttctctattatcatttattagatataactgcatatattatcggcttaaaaaaattgcatatattctctagattttttcttttcctatacgaactaaagaaagtgatctttcatgatcactaaatcaaattaaaaatgacctcttttttttcctcctcttttctctgttaaaatttctctcctccacctttactcccttgaactaaatacactatacatctttgtattaaattatgcagtttaataattcacacaaatatttatataaaattccatgatacatatatttattatttataaaaacatctacatgtcatcatttaaataataaaaaatacagtaataaagaatttaatttaaatcctggtttgtttgaaagaagtcaaatgaaagcaactataaataaacataaaacaaatttattcataaaaattaaaaataaatattagaagatttacgacactaacttttcttactcaaataaggaaatttgatcacttattagaataatatttcctacagttataattttttacaaaattttcacaaactgctcgaggtaaagtttgaatttaatagataccaaaaattgaatttaattacatgagttgtttcattaattaatttagattcaaccacttggcaaaacaagatacaaccactttttgaagttttagatttttgcccatttgttttgaagcatttgcttttctctgatacttctgctgctacttttgttatagattgcagctagttttctgttttgcttttattttttactagctcaattgattaaataagatatatgaattattataaatctttcattaattcttacgaataaaaaaatatacaacacttaactgtttgtattttctaatacaaaattacatataccgccggcagctcaatggtaattgtgtaaggcagtaatgctcaaagccacatagcatgccacgttaattctaggtcaataccatcgagctactacacctcttacaaaatttgagctactgtgttactcataaatataaatattgtaaatcttcacaggatcctaacacttggcattggaaaatggttttgggagcttccacaacagtcgacgttattgtgttaaaggcaattcggcgtcaattaatcgagccaccaatgaacatcctcatctccaacggctagtattttcaaagaaagaccaaatcagacttcataacgtccagcaaaatccaagctaaagagtatatttggtatgagaaaataaataatataaatgaaaataaaaagtggcaataagtgagaaataaaatgataataatttgagttgtttagttaaagaaaaatagaaaaaaaaaaattagtataaataaataaaaaataattcaaatgaatcgcaccattttaaaacttatcagtaagccgaatccaaactctgattgtatatctctagcaaaaataacgaaactctttgtatatataatttgtccattctccataaaaaaaatagttacttaaaaatagtaaaatacgtacgaactctgtttttttagtgatttactttgcatttttatttttaaagttcttattttaaattttaataaaagttgggtcaaatataggcacacgttttttataacgtgacatgtcgtttatattttaatttctttttaatttaaatttatttttcttaaattaaatataaatactctttataattttagttttcttatttgtatttttaaaattttatatacaatataaaacacacacacacacgtattacaatttatatgtttaaaaactatttttcttttcttgatgccgtgaattccatttttttaattaaagtaaaccttttaattttctactaagttaatttatactggaaatatatatatatatatataattataaattttacatgcattaacgatagccgtaaaatatataaaacccttgccaatttgacttctaagtttattttatcatcaattatttgtattaattttttaccagaaatgttaaagcaaagagtctgttgtgaaagttatcttaatcattttggaagaaacattcacaaggagaatcgatcagccaacaacatgctattattcactataattaaataagcaatcttccaaaactttaaaacaaattacacctgtacttgtgaacccatgaacatttagcatatatgaatatgtaagagaaagagagaaaacttaagactcttatgccttaaaaggagtaacacattcgaagaacattaaatatggtcgtggcacagcttaatagccactaccctctggaccatgttcattgttcagagatcatatctgagctaagctttggatatcaacagggtaagcatctgatgcagattgaacactgtaagctctctgagccacaacaacattgccagcttcagtaggatgaaaagcatcccaaaacaagtactctctcctgttttggcatggtgtttgcattggaagacatgtaatttgaccattgttccttcctaccccacagcacccagcatttgtaacactgaaacctgaagattgattcatgtcaacagaactttgtgagttcatattatttgatgctaaaaaaaagtgacaaaaatcatgactacaaaataaaatgcattggtttgaaaataattaccataggctgaggggttgcttataatatcttgaaagatgccataagagttaatgtagatgactcttgcatcaggcagctggttgttgaattggtcagtgagacctttcagtttgttgttgaatatttgatttgcagaattgatcttttccacacatgttttaccatctgggctgttttgggccaattcatttgggctgcaacctatttggcctattccaaacaacaccattttccttgctccataattgtacaaagactgaatgacaaacacaaacagtcaatatttcaatttgtggagctagctagcttttcaattttcaatttcattcctgactttattgtaattgaaaattaaatggctattttgaacactgcatgtttctactatattataatagaaaaattgaagatggtgaatatcaaatggtaaaagacagagagctaaagactaacttttagttgttcagtatatgcttgaataagaacatcagcatactcatctggtgagtactgcctgctgctggaatagaattgaggcatgaaatagttgttgaggtaatcattgctgcccaacccaattgagtatatgcacttgctcaagtaatttgcagctgagtcctcacttcccagtaaatttaccacttgagacaccgtgttttggtaattttgcacctgcccactaaaactaatacgccctccctacaaaacatatgaacaacttaagaacataaataccttaacaaatgaagattaaaaacagtgatgttgcatgaagcaaaaggaaactataaatgggtaccagttgctgcccagtttcctctctaattccagcagcagcagatgcataattgactcctttgagtatagcatcgccactagcatcagcatatggaggtatgtaatcatcgaatcccaaaagttcagctgttaaatttcaacagaaagttaaaacactagtgaaacatttctatgggtatatacttacaagaatcaattttatgttccagatctacttttctcttgttcttgtttgtttttaccaaatcagttcttctggtaagtaaccatctggcagtaattttttcctgtttctttctttatctgtaattctacaattctacctctttgtcaatgaaataaactacacaacactctagtcttaaattgcatattgaatgcggcaaacagatccatgtgaatggaatttaaggatcagtcacaagcctttatgaggggtatctaactcagagtagtgccaactctagtgtcaaaagtcttgctttttttcgatgacatctgcatgttactccttttttaattttttttatttcaccggtaaaaatattaatgcatcttaattataccctttccttctaggtggtgaacatttattgtctgattatagcataatacagcttgtcatccgatagaaaattatgcatgcatatattaagatgcttttagttgcagttaattgataggttcaaaaatagggaagaagaagaacggatcttagaaccattttgatgccattgactcactataactatgacttttacaatgatgaattgatgattattataagtgcatgcatgtgaatctagttttaagaccatgcaaagatgcaaacgagtatatatttcaactaaaatgccgacatgcaaagtttataagccaattaagcatgtgcaagctcaccaattgcatcaacagtggttttcccattggaaaaccttccagaaggtccatcagggaagtcaatcccataaggcaagtaatcagccctagccaaagattggagctggttgttgttcccattatcaaccaaagaatcaccaaaaatgaagtagcatggcacttgtggtgcaccttgaacaccactccacaaaccaagagaaacaacaacaatgagtgccaacatgcttattgtgagattcaaagctgccattggagcaagaaacggtgttgcttgtgaggaattgaagtgaataatctaggtagctaaggaagataggggcatgtgtgagtgattgaatgtggaaggtttgacacgagtataagtatatatagtagtagagagataaggctctatactagtagtagtctatagtgtagcttttacggttgggagtgttagttaggtgcattaaatggacgcggatataacgtgagattgaatgaaatggcttcattaccaattccactgtaccacccccaccatcaccggccgatctatgttggggtgagggtgggccactgcaccccctcatttcaataaaatcgttaatatctgtccaaaaatattatattttgcacttcttaattttatattttgtattctctaattttatttatttgaattttcttaccaattcacatgtaagattaagtaaatatattatcttattttaataaagtgcatatatttatcttaaaattttatattttgtaccttttatcttcgtgtttgaactcaacaatctcatatgataattattaattttttatttttttaaataaattgtcctcactgattcagagtcctagtttcgcccgtcctagtttcgccagtgagcccacctcattgattaaatctgatcactgatgttatccaactttaatgtagagttgcatcttgctgggatggaaatttggacattacaacgactggttaaaacacttaggtatgatacgacactttttatacttttgttttgagtttttccggaatgttaaagtttcgtttagtatgggaatttcaaaaattattttcaggaatttaacaagtctggaaattggttttcaactaagtttcttactggtttcaaaaattaagtttcttactgaaatttttctatgagaaagggtggaatcgaaattcaagacttatgcaaaacagaaaaggttttttttttccataattatgtctttcatttctgaaaatattttagacatactaaatatatacttataaattataacagtcttttagaattttcttactaaatattataattttcaagaaacatgattttttttagtttattacgtagtacataatattttagaaatactacatacatatataatattttggacatctatatacttgattttgccgtgttcaacagaacgagctccaccgcacgacgacctctatagatctagatgccacatcgtctccctatatgtatccatagcaaactcgccacaactgtccaaccatttgaagttcatgcccaagaaagaagagaaatataatagtattaacaagttaaaatatatatatatatatatatatatgtatgtataatcactactataaaactgtattttacgagtcaaatcatttcaaaaacctcttaaaataaaatgcagtgaaaattttgtaaataggagcgcacaaacgatgacggttttacgaaaaccgtcgtgatatgcgcgctcaatttactccttcgtcttcaacctaacacgcattcactcactcgccctcatcgtggttgccctcactcagctcgtgctcgtgctcatgccttccctcattgttgccgccgtcgaaggtgtcgccattgtccccaaagcgcttcctctatcttatcccttccttctctctctccctctccccaaatacctcctctctctatctccacgcgccgccgcaccttcgccatctgcgccgtatcccaaaacggcgccgaaaccgtccccgtacactacgacttcgacctcttcaccatcggcgccggcagtgacgacgtcctagccgctagcttcgctgccaactacggcgcttccatctacgagcttcctttctccattatctcctctaaaataaccgaaggcgtcggcgaaacgtgagtttctgattttcaatgtttttcaatttcgctttttattgaactagggtttataattgtgaaggctagtgaagcagagtttcgtgtttctgaagattggttaggtagggttcaggctaaccaagctttttcaacaagctcatttgtttgatatattctaacggatagcattctatcattggttttgcttattcttaatagttttcaatttaatagttccccacttcccctacatctcttttgctatgctaatagtcaattgttcaggaacctcattgaattgtaaatttatatatccatattaaagtaaagagctattatggtgaaagcacgttgttcccaacttctattttatttattttaacatgtcctgcatatcagaattggtttctgatataacgtaataacattattttatccatttagtttatctattgggaagggcttttggggtggtagtttgtatattatgtatatccctctaatcccatatatattttccaacttttctgcacttgataactcttgaaacaatgcttcgggtgtatgaaacacatgcccgactggcactggaatttggggacctgtttgagtataatcaggtttgttctgtatattttttgaagaaaagagacttttatgttttagttcattttagtctttgattacttttttgtacttgtttttgcttgttatgcttctgtttcttctttttttttcctgagatcaaggattaatatacttcattaaaggcagtcaatgctatgaagtagtgaattataattttaatcaacgagtaaactttggtcccatctttgcttgttttggaaataggaatcatagaagttgaggatgttattaaccttgtaattggactttagatattgaagctatttgtgtgaatgtagtgtcaatctcagttacaaactgtttatgccgaaggcattgaggggtccggtatggattttgctgcttacaacttgctttgtgtcataatgcattcaaataataataaagatcttgtagcaaggttagccttacatgcttgcttgattctttttttcaaaaaaactgttagaactgaattatgtcatgtgattcatctatctgaatttcgtgattattattgttaaaatcttcattgttgaaagttactagattgagtcattttggagttatattcccagaaacatgctttgataattatattatgtttcacctatcagaatattgtgctaatattattataatctgcactgttggaattttctagtttgggtcctttgggagttctgttccctgaaaaatacgttgataatttggaacatgttaataagaatttagaaaatggtttgtgagggaaaggctcaaattgttggctgtttgggacctttgggtccttgggtggaaatcagtgattctcaggtcctgataaacaaaacacagaattggatcaatatatatcaagtctttcaatggctatacgtaaatatatttccttgaattattgtaataatagtttaatgatgtagtctcaaatattttgtcatgttatcatagaatgtcacgaatttgaatgtttagtgtttgtcaataccaggttatctcacgaagcaaagaaggatgaagctgtaaaacatgcccttgccattcgtgctgctgtaacttcagcaaattttattgcattctttagactgtacaaaacagctcctaacttaaacacctgccttatgggtgagtatttttaattaactggtttttgtagcttgttggtaacacgtaacatatatgttaagggggataaaatgaaatgaattttttaatatccacagatctctatgttgaaaagatgcgttataaggctgtgaactgcatgtgccggtcatatcacccagctctacatgtttcatacatttctcaggttcttgggttttcaactggcctggccacaaatggagcaagtgatgagagagatacagatgcattggaagagtgttcagaatggttgaaagcacatgggaccaacataattactgataacaatggagatatgttgctagatacaaaagtatgtttgatctctatcctttgtattcattgtcctgtaggtgctaatctagtcaagaatttttgttctcaagcattgagcattttgatttgttgaatcatcactcattttgaggagcatttacgattgtgctgcctcaaatcactgtatttccttctgccatattttgagagttggtttggttttctctatgaattagttaaccgttagttaacccatacaaatctagaattccctagttactagtcaactttaacaagtgttttcttaacctggttaatggttgtggattggtgatttaatgagaaatgtttaattttgcaggtttcatcatctactctgtttgtgccagagccagaggatgttggtggtgttgctacctgtcagaatatatcacttataaaacatgtatgcaaccatggatgatacagatattgaattgttacagcttaataaaccttcttcacattcgaattgtgaactatgtctgcagattagagattttgtttcagaacaaatgtctgtaagaggtattgaattccataccgaggagtctccccaagctatcacaaagtcagctgatggcaaattctctttaaagaaaccagcgggtgcctcaaggtaaggatggagttttgtttcttaaaagagttaggcacatactgcatttaattttttaatagtgactaaggacttcgtttgagaagaaatgctgttttcatctctagttcgccacttgttattatgatctcatagtcgttgttaatggcagtgcattgtgtatagtaaacttggaaaccacttttgttttgagaactccatggtattcaaatcttcccacattaattgtcttctatatatttatatatctataacatgtatattgaagtccaagtaatgtaaaagatgtaaagaaaagtgaaagtgcgtgatatatactcgtaaaatatacgaagtatatcattatactaattcttcagtatcttaaatatttttagactctttggtaaaaataaaaaattaggtattaagattgtctgcataatatagaagattataaatttatactaacaatataatatattatattgataatataattaatgataacatatattaatatatgtttatctgatatatatgttattattattattattatttgtaatatttacactaggactatatataatttctgttacataaaaaatatagcaataaaaaacttaatgcgaaatcgttaatatatgatttcacaacaacaaaaaatcattaaatacatgatacttttataaaatcgtgatattaatttttcaatacaaaataatgtaatatacattttacataaatgcacttctaccacaaaaaaaaaaaaaaaaagctctttcatctaaaattttaaaaagttaacataaaatatattaaatattaaaaaaaagattaattcattttagctgatacaattaattaaatggactcataattattagtttactttaacaagtttcaattattattttactttgattttttaataattttatatgcatgttattaatttgtatttttatattttatagtggtttggtgatagaacaccattaggcatgaagaacataaaaaataaaaaaaaaattgaaagaaattggcaacctaccttttagaagttaaaaacaaattatttagatgatataagaggaatttatatattggataaatgtttattgtaaatattataatcacttaataatttattgacaattatttgagcataaatatatttatttattacaatttgtttagatctagttttttgaatttgcaagttagatttgttgtaaaataaaataaacattaaaaaaaataaacaacaaaaaatcatcttaaaatgtctattttctaataagatttttgaaaaatcatctttaaatcttcatgttttttaacattttttaaaaaataacacaaactattctaaaaaaaattaatgtaaaaatcaagattttaaaatgatttaaaaatttttatgaaaagtgttaattttttatgtggatccattattaaataaccgtttttgaaagactttttttttataataatgaataagggtgaaccagtattttaagtaataatatttttctttatttttattttttaaaaccttatcattttattatccctctatttctgtcatatttttcttcaatcaaatgatctctttaatttctcttcttttctcttctgatcttttttttttttttgtttcattctctccttttaatttcatcctcacaaccaaatgaccccttaatgaacacttaggagatcagcaactgaattatacgctggagcaaacaatgaattaatgaagtgagatgttggtatttgattttgacagaatagatgtattttattttagtgactgaaaatagatgtacgtgttaataatgtctacttggatgccttgcatatcatcgtagtcatctcgtattaattaaataattggtcatgcgaatggcaagtgagttacaaatgaaaattactgtcaagttaacgagagagtaattaaaacgtagaaaaatgctagaaatacttgtttttctgacagcattcaatatttgatctgagtttatgcaaagatatggatatgaatacgttgtaaaatgattagatcatctcaaaaccacagatataaactttttaacttataaattataatcgaaaattcataaaaaaaaaaaaaaaaaacttatatcccatatatcaatcaatagatggaagtgcatccttcatgcagttattttatggaatcctgaggatacgtttccggcattacgttggagatatctacatgaaagtaaatgtcaattaattattgtgaataaaagaaagatcgactgcctattattacctcaaacatgcactagaggatattgaaggacgtatttaaccccagatttaactagcaataactaaaattaaataaataaataaattttaggccaaaatataagaactgcttttaagaaatatttttttataacataatttatttctatattataaatttgattttttaatttcaaagaaaagtgttactgttttgtacagcttagcacatagatcaataaatatataattatttcaatttatccaattattttaaatttaagttttgaatacataacttaaatatttataaaatcagagttatctaaagaattataagattgatgagtggttgaggaaaaagaggagaaagaaattatgaacgtgaatttttcactaacaaaaattaacagaattaatatttatgtattaataatatataaaattattttatattgtcgttcccataccttttttttctcaaattaacagactaacaaacatccacagataaaaagaatcagaatcacccaccagattaattgacatgaactatggcatgcatgcatgcatgcagcagctagggtaggaacagcatctacaaattaactactatcaatccgatctttccaatcaatgaactggttactagtgattatggcctagcggcacatgctcagaataagcatgtctttttctccggacctaccccttttgggtttcatgcctgagatggtaatttggaaagctggaatgatcaaattataaatatgcccccttttatttgtctccttgattgtccctctacacataactttatgacacggaacgaaaaagacaacgatttgatatataagcatgtcttaataaattataaaatcacttaatttttttttatttaagactcacaatattaaaagattctatatattatgactcaactaatttaaacagcattaaggttaatcatatttttaaatagaataaaacctttttttggtgaattaaatataataaaacatatgacgactactgatcaaattaattgtgactaccttttcagtgctaatgtgatcgtctaataaaaagacaagcaaaatattagcgacaacttgttattaattagcattcgataacacttatttaaagttttttttattctaacagtttgatccatcatatcctatgaaatcatatcacccgtgaaggttgttaattaagattcttctatctagcaacaccttaattaatatggcataaccttgaaagtttgttaaggattagattcgaaggggaaaatggtttatgatgaataccttgacaatcaaagacaggaaacagaataataactgacatttttttattagccaaaagagatttatttataaggtaccggcaaacgcccaaaaaatgatgatgatttacaaggacctaccccctgcacatacattcactagcttagcaattcaactcgaccaattgtttgtattcccaagcccataaatatccaacccgagacatcaacatatcgcatattacatgttgatattcatccaacaccagtttagacccgatttaagccatctgatctcattttcctccccattacgataattcccatccatcataaatattgtatacaagacaaaggatttgaataccactcaaaataagagaaatgaaaagctttaagtttagcctccaaccatgaccaagacttatattttattacctccatgacagaaatccaagtcaagtaattgatagcggaagatgatgttgtttctatggcaccatagtaacggacataatgcaagggggaattgaaaataagctttaaaacttctttaaaaaaccagaattttttgagatcaataatcgaattcgttcatgaaattgtaagacgtggacaaatttgtttctaaaagataaaaaattcaaatttagtctctgaatatgcaaaaagtgtaacaaataaattagtccctaaattttataatttaatgtcaaattgattctaaaaaaatataatttattgttaaattgatctttaaatattataatttaatgataaaatagtttcacaaatttaacgtcatgattaataatttgacgcattttttacatatttagggattaaatttgtatttttcatttttcagatatcaatttattatctcattccatttttaaagacaaatttgatttttttttttttataatggtgaaagtgaattttaaactatagtacactagcttattaaatggacactttcaccccctaactttaggacgacaagtgctctcaagagtcaagatataaatttggtcttcggaagccatgcaataccgtgtagctaactattcctatatacagcatcataaatgctttgatattaaattaaagaatgtaatgagtttgtctaagtcatacttagtaacgtgctttgttttgagtacttcattattatgcatttatagcaaaaagtccacactccactctcttcaattcatgatgtttatccaacattgcaagttgtcgttgacgtttgcctagggctagaagttagctttttggatggcttttggcattcaaaccaaatctgcaacccgtgatcctttgtaatgatcaataatcgctcctacagttttaacaactagtactagtactagtagtaatatttttttttaagccaaacctcttactattataagaaagaaaaaaagtaactaactaactcaaaatgaaattatttttaagaactaatttatagtataaggatttgtttcgacatgaactctttttaaacatttggatatataattgttaatgtcttataaaaaaaatggatctaatatgtacatatagatgttcgtttcctggaaattctcaagcgcatcttagttttgaggtaaaatttgctatgataaaaaattatttaaaagttagtaattttcttctaatctaactttttcatattttttcttctccttttttagtttccatttccccttcgttttgctagatctaaagcagtgtaattatagggattgttgacttatttaattaatggtcggtaccaaaattttcaaatttaaatgtttaaaataaaataaaataaaataaattttatttaaaagaagttgtacaccatacaattagttaacagtaaattataaagtactagctagtaatataattttatatgaatatggatcgttgacttatttagttaacaatcggtaccaaaacttttcaaatttaaaaataaattaaattagaatttatttaagataagtttgtagcaaacaaagtttaagttaagagtaagagaatggttatacactaagttttagatagtcatctaatcacaattcaacatgtatattaattttgttgacttttaaaataattatgttaaagtaatttaaaggattatttatgattagatgataatataaaaattttataggacattgacattaaattctaagagtaaatcataaagtataaactaatataattttatttgaatagtttatctaattaatacttttaaaagatgtgaaactgctttggctagcgaactaacaatatatagtactatttcttaccgaatatctaatattcggcacggggataggagaattagtgttagatattttcctgtatttattgactgtatcatccccccaaaaaatactacaatagtactattatattgcaagaaaacgtatggtgcagtaagatgcttggaggttgtcactgaattgaaagcatcatgcatgttgaattacgtttgttatttcatgaatatgcacggaaaaacccacatggcggtgacaattaagcagaaattttctttatatagtacgggatacttttatcagaattaaaaattcccccctctttgagaattgttctacattaatttgatcacattcacttaaaagttttttaatattttttctgaaagaagtgtcccagctgtgaatcttgatgttgatcgaacatgagccatgacaacgaatagcactcattagcatgtgattacaggctgactcggttgtttcataaataatccatctgcctttatgtgtgtttcccttttttgcaaatcactaagactattcgaataagacatgcatggtctccccattttttgagatgtaaaccagacatgttcaaatatggaacactcaagtaaaaaaatgatagtttcttttttaacaagtgggaatggaagacattgtcataagatttgtaaacatcatgatcaatcaattgaattatattcttaactaaaaaaataattttttatttatcagaatcaaccacagtattatagaaaatttataataattcacaaatttttattcaatcagttaagttagatcttctttcaaaaaaaaaattaatgactaaggagacatgtattacctattttataagtttacattcaaaatttgagttaatatttacgttatacattactttactgatatttaaacacataacacagtttgacttataaaccccataggattagtattagagtggagtaagacaaaatcttcttgtaaatgaatatgataattaagaagtttcttgctaatagctatgtagtatatgaatgtttttttttgcatatatttcatgggtatgaaccaccacatgggcgtgataatgagccattgcccaggggaaatgtgctgtaacgttttcttcagcaatgctaggctgttatacgcgcgtggtccaacacaaactgttagagcctaaattaaatcctaatcgtctctagtctttaatgttcggtataatgtctcttgacttttgtttcccttggaagatttgaactacgcgttcaatcacggaatgtcgcatcctggtggcaatagacttattttattcatagccttttactattctttatgaatagtaatggcaaaagttacaataatactatcataactttaacctagatttcttctataaaaaaacactgacctagaattccgccgtaatattgggccaatgaggttctttgtttttacagagccgatgagtttcaagatcaataaattaggttattagttgactttagaaaaagtaaaaaattgatttcacagttattaagaaaattaattaattaattaatttcattaaattatattatttttaattaaaaaacaaatatttttttaaactactcccattgaaacttgatatatctcattaaactaaggaaaagtagtaaaagagaacaaaaaaaattgtgtttttgtttataaaagagaatggaagagacatataagagcatctttaatgctagatcttcagtaaggatcttgaatttaatatctgattttcactaaatcttctaataaaggagttgaagaaatctctaatatggatgaattattgtagaaaatctcttaaaatctgcatattattcaaaaaagaataaattttctttctttttctctcttactaaaatctcaaaataagaataccattaaagaaaaaaatggaagagatgttgaaatttttttaatcgtatgtgacattatgggatctatcaaaaatagtcaaagatcctaattggagatctactaataaaaatactctaatacttcttataaataaaatttcacctaaattatacaaatgtatattaaatttcagtttaaatcaaatttatatttctttaggttaaaaaacgggtacatgactccctctaactactttcagtactttgcggtgtctaaccacaattcttttttgtgggactctgatccctcttcttgctcccattaattactatgaccgcaatttcaatgggcttcttgaatacagattttgctgaccttccatgagtttcggcctgttccttctatgttctgttactgttctttctcttttttctataaatttgggttgggttttgatagagtatctttagactaaagggtatcaacatagtgaaatctgcttcctacaccattctttttctattacaccatttttgtaatggtggaatatccaaaatatttttcgcgttatgcttcatacatatccgcataataagtttttttttatgaaataatttaaaataatggcatagacatgtctcgaacatgcaaccttcgcattattaacacgatgctccaatcaaccgagttaataggccaattatgttgatacatataatactaaattttttaatgtatatttaatacacatataattttatataataaatttttaacaattaattttaatctaataattaatttatagtttaacttatctataaattttgttttgtaacatatattgttacgaaataatttatagtttaatcgcatgtttgataaattaattattagataaattaaactataaattaattattagattaaaattaattgttacaaagtctattatgtaaaattatatgtgtattaaatatacattaaaaaatttagtgttatatgtatcaacattaattattttttaatataattgacttattagctcagttggttggagtatcgtgttaataacactcgtaggttcgggacctgttttcgtaaaatatattttaacataaaaaaaaacttatggacttatggattcgccaatccgtatgaattatgcggatccgtatgaagcataacgcgaaaaatatcttaaacaacaacacaagtaatccaacaaaaaataaaagagagaacgtgtgtgtttgttttaagactcttgaaatcttcccctttttattttcaaaacttgttttcaacatatttttatattaaaaaaatatgtatagattttaaaaacaaaacaaaagaaaattttatttgttaatttcttttttagaaaacagattttaaaaagaattgtataaaataacaatatatgtcaattacatattcattattacatatgtgacatttaacaacattttttgtctaatatttattaaaaatgttactaaatttttttggcaacattcaaaaaatatcgtcaaattatcaatatatgttactaatatgtttttgcaacattttatcaaatgttgtatagctcatattgctaaaacctaaaaatttcacaaaaagactttagcaatatggactatacgcaacatctaataaaatgtcacaaaaacatattaataatattttttttcataatttgacaacattttttgaatgttgtcaaaggtttttaacaaaatttttattaagtgttagacaaaaaaatgttgctaaagatcacatatgtagtagtgattatacaagatcgaaagggttctttatttattacagtaaagcatcaaacttaaaactaaaactacaaaattaaattataactctaattggcatgcatgcaattgatctttttctaagagttcaagttcttttaaggccttatgttcaaagtagagaatgaactctttgtttaagtgagtaatgactccagtgtgtcttaatgctcaaacaatggcataaaactcattgtcatgcataaaatacttaaatttgtcatcattatataattaagtttctcataaaaaaagaaaaatataagattggtctagtagttgaaaaagaggtgaaagaagaaagaaagaagcaaagatcacgagtttgaatctcccaactaatatttctaaaactataaactaacatttgtcgataaaaaaaaaaaaagtttctcatgaaaaatatgccatgacataaaactcattgccatactaaaaaagaaaaatacttatagcttcatttccctcttatcttggtcaactttaccaagtagcaatggtgctaacttgattttcaactcatcttttataaagaagcaattgtttgcatagttgttatacaatgctcgatagtcttattgctcaagtctccgaagaagatgacatgcatcgaaggaaataacatcatatcctatatgattctatgatatttccaagcagatgaaaaatatacaatataacatttagaaacttttaccttactttctttgttatgtcattgaaacttgtatggaagtggatgtttttgtgttgataacttattcaccatgtagttttatactacattttcacaccctttgtttattataatactagtacggtaccaaattcaatctatagtagaatatttgcaaaaagataaaatttgaatttcaaattgcacccacaaatgatataaatactaccgttgcaatagctttacttacatcaattgcatatttctacatgaatctttcaaaaaaaggactagcttattttaataaatacatccaaccaaccccaatccttttaccgactaacatctcagaaaatgtcacaaaactcttatctcttagtttttgacattttggaaatatattagctgatgaattagtaattgttgttcttgtttctttagtacctttagtggttcctatacatgtcatgctccttggattattcacaagcggtattcaagctctaatttttactactttagttgcagcttatatagataaatccatggaagtagaaggcgctctggtgggatcctcacgtatagaaaaagattgcagtcaatttgataaggatcgagtgacattgtttctttgatccaaaccaaggaatcccttaaatattattcaaaataaatcttattctatcgttgatcaaaggtttctctatgaaaaatacgaatcggagtttgaagggaggagtcctcaacccacaacaaatagaggaggatttttcaatcacattgtttgggctcctagaatatggtgcccttaagacttcctatttgattgtattaaaaaggcccaatgaattgagatttttctattgggccaagtcattttgggagaagtggatcatttatgacaaagaggatgagttttaagaaaatgatttagagttcttgcaaggtagaaccatgtaataccagacacgagatagatctttcagagattaggattttttttcaaataagccaattcatttgggacccatagatccactctttttccaattaaaagataagccttttgtttatgtgtaaagttagtgaatataataatggtgtagtcttttggtaccaaagatgagtagtagcaggtctactgtataaagttgatgtgaagcaaaaacacttcaaaaccaaacatatcttgttgatcaagctagtacttgcctggacggtaaagaaattgcaagataaattgttttgtatataataatataatgttatataataaattgatctaataaaaacatgtgaattgatcaaaatatttttcttttaaaatttaaaaaataaaattaaaatataaacttaatgatatattttaattttattcaaatatataattatttaaaataaaaaatgtataagttattattatgaataagcatgacaaatgggtgggagaacaggtatatttcaagttagtttgctaagaagttagttagaaatgtttatcaaatcaatgatcattcaatcaatttatacaatgttcttatatgatagtcctctactatatttcaaactttatgggtatgatgacattatgtttgtgctagttgtattttttttcaaaccatttcatctcaaatttctaatactaatcaatattggttaacgcttcaaaaccaccactacactccggaggagtattttgtaagctacatcaccagtaatataccaaaaaagtgtgttcgtacccggaaaaaaaactaaaagtattaacggttcattgtttacaacaattcaattttttttaatatcattttttagatattttagtttacaaaagaagtagggatatgtcacttccccaaaaatatattcaagaaacccgaccccgtgcagatcgtctttttagccattttctgaagtagaggtgttgatatatcacaaaaaaaggtgttgataaaatttaaattagatgatcaaatgcattaatttaattttggagatgaacatcacaagggggaaagaagtcagttaaggacgcacgtcttaaaaactttaaaagaaaaaaaaatccatattccatacaagataatattggtgtacccaaaaaaaaagatgatattattaaaaaaaatcttattataattataattttaattaactagaagttataagagaatataaaccaaattaattaaaatattcaatgaattcctaattataataaatacatagtaatttttgtatttatgagaaaaaaattagtcaataatcaaccatttatttatgacaaataatatcgtattaaatatttttatgttgacaattgttatcttccgtgatagaaaattttaaattgaaattataattcttaattcaaaatagggtttgggttaagaattgattgcaaagatctgtgtcataaatacaatattgatttaaatggtcaaataatcattaattatattttcaatcaaatcattatgttcaaatttaagatagtagtatcggttttacgaaataatcattgctttagaaattgtcatgtgtggagttttcttcttctttttttaaacattttacttttttatagaacattttactttttttaatgcaataaaacattttactttgtatatagtaacattttctttaacagtgtatataataacatagatagaattcacaaaaaaaaagtaacatagatagatttgttatctttgacacgtatctttttttttagggattttacacgtatcttaaaacacacccccttcccaaaaaaaacctaaatcataatggacaataattataaaaataaaatacaaatcataagggacaattttttaatatcctacgttgatgttcactaattaaatcattctccaatttcaattcattgtattcgcatgcatggctagtctttgattggacgagaatgaatagattaatctaacgcattacactctttaagattaatctaacgcattatactctttaatgtatgctctttcaaatacatgatctcctttttccccttcaagccaattacctcgtctatgccttttatctcttcattgtatgggtaatcttccttgttctattatggccaccacccttttgatcacttgtacaaaaccacggtgtgaaaacaatgtggagttgtggtcagtaatgtgaagcgaaatcatctcacgaaatattctacattcttaaaattatcaggttacaccctacctgtaatgggcatattttggctttcaaaattttcaacaaaacaatgtctcaagtaggtatattttgttgtctgcgttataacttgcttgtgttgcctggtgtcattttatccattattgtaaatgatttatttatttaacacatgaaattttgcaaaatttgctataggcatgttaagggtattgttaaagatatgattagatttgctgattatagggatttatttccctctttcccttattatttttatcccttcagaacacacaattccagcaataatacttttttttttttttttgtgctgaccggcaatacttgtttaggtattttattccttgaaacagtattttgttttggtagtcattcaattgttatgaattttaagtacatttcaatattttgttcacgattcaatttcaggaattttctgatccttgtcttgttatttgtctaatgtgatgagaagcattgcgattatttttatgcctgatggttactttacgcatatatcatcagtatgatttttacttcattgacaatagagaagttgttttagcctattgagacatacaacattgactaatgacaatacaatacgtggatcaaagcatgcatgtgttagttctctagagtgcattttcccatttggtaagtaatagaaatgtgaatgaaactggaaaaaatatgtaacaaatgattggagtgtgcaactatttccgtgtttatttgagaatgtgattgagcattatccattgttgaatatttgaaggtaggaaaaataattttaccttttgagtaagaatgctgtctttgtaggaatcaaataagtgaaaagacttaacatgaaaatttcaggccaagcgtatgccagggaacaattataactgcgtccctttaacaccaaggtctagattggaaaggcttctgagggaaagagagctaaggaaatccttcaagcttattcaaccaaccgaggaagcaagagatggcagcaaagagggagaacaattttatggtgattcatgcataagtgagaatgaaatttcgggtattcataaagaggaggagatcacggaaacgaattttacagatagaagccaaaggcaagatgagaggccaagcaaacaacgtttgttggtggtagctaacaggttgcctgtgtctgctgttagggagggtgtggagtcatatcgccttgagatcagtgtaggcgggctagtcagtgcacttctaggcaagaaaattttgtcaccttgcattaattgtttctttggtgtgttttgttaatttatttattgtgaagtttgtaattgtaactcaaccttgctaattagttacctttcttgatgatctcatagaggtcacaacaatgatagttatcttcacaacattctaataataatctattacttataggaatagattgaatttttctatttttaaagtgaaggttgtatgaagcttgttgtttttgttgaaggtgttaaggaatttgataccagatggattgggtgggctggtgtgaatgtgccggatgatgttgggcagagagcattgacaaaagctttagctgaaatggtattgactcaaatttataattcacaagcatgtggccactgatcaatgtagtgaataatgataatctagcaactcttctctttgcaataccaaagacacacaaaccatcagtaattatgcgttgttaactgcagcgatgcataccagtatttcttgatgaggagatagttaatcagtactataatggctactgcaacaacatcttatggcctctatttcattaccttgggcttccacaagaagatcgacttgctacaactcgtactttccaatcccaatttgacgcatataagaaggcaaaccaaatgtttgctgatgtagtaaataagcattatgagaaaggagatgttgtttggtgtcatgattaccacctaatgttccttccaaaatgtttaaaagaatacaatgaaaaaatgaaagttggttggtttctccatacaccctttccttcctcagaaatacataggactctaccgtctagatcagagctgttgagatctgtacttgcagctgacctggtggggtaagttattctcatgcatctccaacttgatgttgattatagtagtacattcacaagctaaattcctttggtatataggcatcaagggcatgcatttagaacaagctagtcaatctttagtcaaaaaattatcttccaccttgagatttactgttcttgcttgttgattgcactatttagtcaatagtatcaagtggtatgttgctgcttgctaggatatttgagaactctagacattttgtttaatgttgtgattttaatattttcattggtctgcgtcccagattccatacctatgattatgcaaggcattttgttagtgcttgtactcgtattcttgggcttgagggcacacctgaaggagtagaagatcatgggaaactgacccgtgtggctgcggtatatctgcatatattattttccctttctaattctatacatctaactgtgaaactggaatttcatcttgtgttgtatgtttatcagcattgaatagctttacgaatcagtatgcagtatctgatttcattctcatgatgacaatgttttattttttgggagtgtgaaacttcagtttcctattgggattgactctgatagattcattcaagcccttgaactccctgaagtccaagaacacatgaaagaactgaaagaaagatttgcaggccggaaggtaggagccatatacgccaaagtttcttgttcaagaatttgagaagttgagattttcctcagtttcttgtttctgttctacatctgcctttctctgaaaatgtgaatcattagaatcactttatgtttcttatcaaatggacaggtaatgttgggtgtcgatcgtcttgatatgataaaaggaattccccaaaaaatcttggcatttgaaaagttccttgaggagaattcacactggcgtgataaagttgtcttgctgcaaattgctgtacctactaggaaagatgttccagaatgtatgttatttctctagaaaagttaattatcacttgaagcattcattttgttagttctctatagttattggcatttttcatgactgacactattgacttaatgctttggcagatcaaaagcttacaagccaagtgcatgagattgtaggacgcatcaatggaagatttggaacacttacagctgttccaatacatcatctggttggtgttttaaacatctacagcatatatgtcttgtttggtatttgacgatgcaaggatcatgagtgtggatgctatctattatttgggatctcattgaaaatattaaatttctcatgtcactactatatatgagttgatccccgttactacgagatttgaactattgatcatctatatattgtctgtgttctatgcattgcccatttgatcattatgttgccacccaaaagctgtaaattcaatgtctaggttgatctacttaattcaaatttgttattctcaatttgtgttgttagctacattctctgctagctgttctacaaaacatatcattatcacaaacatattcacgacgtctcatttcttcatctctcttatttgatcaagtgatataagacaaaagtgcaaaaggaataaaaaagggaataaccattctagcagatgaacaagaaacctactagacagattctcctgaaaattaccaggaaatgaggaaagtcctctgaatcataagtgataaataggagttgcatttaatcacatcttattttttacattgcaaccttttgataacaagacttgattgacaagtaaagaaaacatacctatacaaagtactctgatgggattttaattctatcaaaatttccgtaaagttacctccaataacccgataaaattataaaaattctttcaataaatcttcaatagttgatcttcttttgtcctgcatcaccaagtaactttcaacctattctttctagattaccttgatattgttcagaatgtggagcttttctattacacaatcacttatttgtgtaatgttgtcaaacgaaaaaattatttcccttccatcaaaaattaaagttatatttattttttacaaatattcaagtaactaccttgactgttctttgcacacactgaccatgcattttgtctcgttgattacacatccttctcttgaattgctaaaattttttgggcaaagtaaatacattgctaatcttcccagaagagtgacaaatgaagcgaagtcatatgtttatttatcatacagaaaatattgttattgttattctgttgaccttgtaatgatttctggaacatctctttctatgattacaggatcgatcacttgactttcatgaattatgtgcactctatgctgtaactggtactcattttctgctataacatacaagatttagtccatgttgtccttatttattcaaagtaataatattttttatataaaagtagtatcatatttcaccattggattggtgaaatactcaagctgtaggacattctttcttgttattggaaaagaaatttcattatctttgctgactctttctcttttctttaatatatgttccaagtgatttaagtcctctgcttgtaacatgtacctggctgtaagaataaattgaactgattgatatttatttaccaggaaatgaggaaagtcctcaagaatcatatttcttgatttttaattcattgagaaaagaataattgaagtacaatgacttacagttgtttcttatattcacatttgtaatatacttctgttttatgcttaagatttgacaactattcctgggaatcagaaaatggcaacaggctgcagcatatctttataatatattataaaatccatcttaagtagttttattgaactaagtattcagcacccatgatatgtatcataccagtctgactcacatcgtatttagatgtagcacttgttacatctttaagggatggaatgaatcttgtcagctatgaatttgttgcgtgtcaagcatccaagaaaggggttctcattttaagtgaggtaattcagttttttaatgttctcatcatttattttggctgcatctcttggatactctgaatgtatttgagcttcatatttgagaaagtgatttatgttttactaagatcaccaacatttcaaatgattctgccattaagcatagtaatgttgaggtatatgtatttagctattttcataaaacagcaaaacataaaacaaatttactgtcatttaatgaataagactttcctaaccttaactaggtcaagctagcaagtcctaagaattataaacaagtttgtttttcctttatcaccatatattaatctttagcaccgcacatagtctttttttattttatttattttgaagtgtttacacatcaatggtgttaaagtttttctagtctcaagctcacagtttggcttgttggaaaaagaaaaaaaaactagcctagctaagctgagaagctcagctttctttttattttgtaacctgaattgtgtatagtttgttaggctcaactatagagaaaaatcatcagtatgttgtatctgtttcatcaatcatccgcgtcattgttgagctctgtaatgacaaggtctacttttgatggtaacctggttatgctataatgtgttcataagtatacttattgtttcttgaatatcaagagccagaatttgtttttgtcaaaggttaacatttgttgaaagacatatgtcaagagaataagctagggtaacatgaaatgattgcttttgatgcatggaattgtggttgctgatagactgaaatttaaataattataatcatcttcccctatcattatcattctataatccacgatgcaatattgatgtatatttatttttcttttaaattaactatgatgtccgtgttcttcatcttatcaccatcattgtgaatgttaaatatacgaaatgatcaatctattcaaaccaatatattttctgttcttagttgttttctatgtacaacccatgagtgctttacaaaaactggaatatttgtgataaagtgacagatagaaaaggatagggttgatactaggcttctagttcaagacttcagtaggaatgtaagatcatattgtagatcatattctttataaagttattgtttgtctggaaatatcatcttgtttaaataaaaacaaattcttatatgtccaattattttattatcacataattaactcctaaaatcactaggctttcagtataattcaaataatttagaattctttatttggtatcagtttgcaggtgcagcacagtctcttggtgctggtgctatcttggtaaacccatggaacatcacagaggttgctgcttctattggttatgcgttggaaatgtcagctgatgaaagagaaaaacgacatcagtttaatttcaaacatgttgagactcacacatcacaggaatgggcagcaacttttgtgaggttttaatcctataacactgcttgcattttgtttttcttggatcaattttgttccatattttatttttcttgtaatatggaacagtcagtcttacacaagcatattagatcgaccactaaagctagtttgaaatagtgtcaatgggaaaatggagaaaaatggaaattctgtctttgaaatagctatattggtcggtctattgctctagattttgtcctgaccttctatggtggtctctgccacttatgcttttcatgattatttattctaaaaacaaggttttatttttacagtgaactgaatgataccattgttgaagctcagcttaggacaagacaagttcctccattacttcccaacaaagtggcagttgattgttactcaaaatccaataaccgactaattatactggtaagctgtttgttagatcatcaaacactgaataaagggctgtcgcaaattattcaccctattttgtgcaataagtattaggcttacatttataaatggaaaccaacatgaccttacttatacaagtgcaccgcacgtgtttaagagaaacgcacatgaggacttatttgtttccacttgttttttgtgaataagtgagaagggccttctcaccaacatatgtagctccttttcactaaaacaataccattttgcctcaactgcactgcagggtttcaatgccactttgaatgaaccagtggatgcccttggaagggctggtcaaattagagaattggaacttaaattacacccaaatatgaaggaacctttaaagaagttatccgatgatccaaagacaacaatagttgttctgagtgggagcgatcgagcagccctggacaaagtactatcaagaaaacttcatatgtttttggattttcagcaacatttgcttttggactaacaactactttatgcagaacttcagtgaatttaacatgtggttagcagcagaaaatgggatgtttttgcgacgtacttcaagtgagtggatgacaaccatgcctgaaaatttaaacatggattgggttgatagtgtgaaggtaaattagctgcatgcatacaagtgtttctcttattaagttcctttagtttcaagtgtgattttttttttttcatatttttttataaaatttcagcatgtttttgagtattttactgaaagaactccaaggtctcattttgagcttcgggagacgtcagtagtatggaattacaagtatgcaggcatgtgaaaattttctgttaccatcttcccttttaattttcaacctacttatttttttctaggactaacatatgtttttatccttaataaatatttaaattttgtttattttttgataaattttttctttatattaagtctttaataaaacaataattttattttttatcattgtcactttttttttgtctatgataaattagtaaattttggatttgtttcttgataaaagaaattattttttattagtcttttttcaaaggaactaatatcaaatgagaaaaaattatcagagaacaaaaacaaaatttactaatttgtcaatattaaaaaaatgtcaatgaccaaaaatcaaaattttattttatcatggaacaaaaataaagaaaaactttattaaaaacaaatataaaatttggatatttattgaaagatcacaaacatattttaacatttcttctgataagacaattgtgctgatgcacatcatctctttactcccttcccagcaaagtgggagccttctatggttaattactaacttattgtgactgcaattaacactagatgttgagtttggaaggattcaagcaagagatctgcttcaacatctgtggacagggccaatatcaaatgcatctcttgatgttgtccaaggtggtcgatctgttgaggttcgcacagttggcgtgtcaaaggtataagcaatttcagctggctagtagagtctctcacctatccttttctgttcagaagctttatttcctctacatgctagcacctgacactttttttggtatagggagcagctattgatcgtatccttggagagatagttcataacaaaggcatgaagacgccaattgactatgtcttgtgcattgggcactttctagccaaggttagtgcactttatttgattttctattcttagttcacttgagactttgttattgttagagtggcatagcactaagaatgactagatcgttgccttttggcagtttggtagcaatgatagaacatcaattgataaggtaataaaatataatattgaacactgaaatcacacacaatacagcagtacacttactttcccaaagacaaaagtctcctgcagagagtacccaaactgcaaataactacaccctccttatttacacaacttactaccaaatatatactcctaatagataactgtcagtagttagttattttatatgcatgcagattctaatatggaactacctccaattcattaagggtcctttcctaaccaacttggatctcagttcccatcacctaaggactcaactgtaaatattagaatgaaatttctaaaggagcattgattttagattgatctacatcagaaaaagttacatgtctaagccttctataatgattaaggcaaataatggttggaaatgaactgtttcaggatgaagatgtgtatacattttttgagccagagctcccttctgaatcacctccattaccaagagctatgctatccaaatctaattcttacaggccatcatctctgccaaaattaccagccaccaaaaccgggtcgaaggcagctcaatacaagaaacaacgttcgttgtcaaacatagaaaagagagaaattgatcaatggagaccaatgtatagtgataaaatagcattgcatgagggttcctcagtgcttgatctaaaaggtgataattacttctcttgtgttgttggacggaaaagatcaagtgcacgttaccttcttaaaacctcagatgatgttgtcaacctcttaagtgacttggcagaacattcttcatcaccaaattaactgattgtctttttgttagattgtttttttcttggtaaagtgtctattcatatcatttgattatgcaatgccctacatgtctcttgtgatttgaatgaatctcaaactggcaacgtgcttccagcatgtttggaactctcagcatgtttggaactctcgaaactgtttgaaattctaacttaattttgctatataaaaaaattagttgtttgggtgtttcttttcgaattgcttttacttttactcatagcacgtttaacagaaagcaacaaaaaaaatgtagcttttgccttagattgagattttacactaaagtccactgttaacttgcgtaaaatcaaaatatttttaagttggcaaatttttaccaaaacattacaggaattgaatgaaggagtcccactcaatcattttcaaagattggttttaattttaaaaccagatatgatccaaatttaaagtagtttaaattaaatcagtttttatttgttttaccccttacgtatttgttttaatgtgagaaatgaacaaattttaaatatatatatatatatatatatattaaaataataaagaataagatggcaaaaacaaatactataattttataacataatacggcgatatgctaattccataccaataaacacttctattcttcaattgatattaataaatgagaatacaaaacatgggggcatacacttattcagtgacatacaaaatttagaaaatggccgcataaccaaagctttcactgtttaacaatgctcttgaacttttgaactaagttttacactatatgtgtattaaatgaagaaaagatgactaatccctaaatgaatgggtggatacatcaagaatacaatttacagctaccaaagaaaaattaactcaatgcaggtcctggttggggcagaatggtgttcaaaatatgacacaaacctcaatcaagtttagttccccttaaacaactcgaattaattcccatgagctattcttctagtcttggtttgttttggcacatatgcatattggccaaagtccacagtttttattggcctgagttaagacaagcaggacacaaatcatggtgttgatacaaatgtataagagataatgaattccagtttggcagaaatacattacctattatcagaagtgttttgaacatctttcagaggagcacggagaccactgacacgagtgccagaagtgcatctaaaggatgatatcacggagacaaatctttccatagacttctcagctatttctgaatactggcccagatgggaaatgtttgtcccaaatttttcttcttcagcattattctctgtaaatggtccgtcaacattgtgatcacagcaacctataatcaagaaacatcagaattcagagaaacttcagcctcagcgagatatttcctttcatgattatttaaaaaacatgcatatattcagtaaagttcatggcagatatctctgctgagcctgaataaaacaaatggaatccgaaactgagaatttactcctttttatcctcattgaagagtactatgttattcatatactcaaagcacgattttccataaactgagcttttgctaaacatgattttacttttacttttgctaaagtttatggatgtttgaacctctctttgtgatttcctacttttccataagggttaatagttaatacttaatactgataaattgtctatcttacctctccaactcagacaactccacaagtctgtactctttaccttataatactataccaaaagtagtcaatattaaattattaattatgtttaaagataagttacaatttagaatcaataggagcttttcattatccacaaaagtcaaattgcactgaccaaaaatacaaaagtcaaatcgccatgaaaatgaaaccgaaaatgaaatttctaaatgaagaagtagtcaatcagtatgcatagaagcttctgtgggagttgtaaagccacattcttaaaagatgataatgcaataacaacatcagtggtagccaccactttggacagcaagcaaaagacaacaaaagcaaagaacataattagtggaatagtaagacaattttagcaaacaaataaaattcataccattattatgaggaggtgaagaacagtgcatttgcctgggctgcaaattttcctggagaaagtcatttccatcagtgcatgagtaaaaggagaaagtgttaaagaaaacataaggtccgaagtttaaaaaatcctacattttgaatattgtcattaggggagatcttccttttcaggtctttattcttcaaatggttgttacataaatcactgtcagatatggcctttcttctcttgtcaatgacaatgccagaggacaggtgatcttgtttctcatcacaaacattattttctacttgcttgtgctgaaaataagcactccttacaattacctttcttgttgcctccctgctctttccttcaactgagtcaaggactatctggtctttattcttcacatcgttgttacataaatcactgtcagataaggcattttttctctcatcaatggcaatgccagatgacaggcaatcttgtttctcgtcacaaacattcttttccacttgcttgtgctgaaaataagcactccttacaattacctttcttgttgcctcctcctggtttttccttcaactgtgtcttggacatttgtgtgcccatgcaaccccagacatggtttatgaattggctgcctgggctgtcgcagtactgtatgttcagggcttttcttctcttcacccaccatagacaattcatgcaaacaatgaaatgagtaattaacacatgtaaaggcataagggattttcccatccaaagcaaaccagcagatttatatcttaccatgacatggagactctgtaaattcagaaatgtttgtggcagaactatatcgaatctaaagaaagaaaggaagaatatgtttaaaaaaatatgtaagtctcactaccaacaatgagtagagttttcactgttatagttcaatattcaggcaacttacatggctattaggaggaggggcactgccccaattctcagagtcaataaccgatgcagtagagttctttgtttcattagcagcagtaggtgacacccgaggagctctgaatttccttttcgcttcaagagaagtaaaacctttcatggctaaggaaaagttactctaaagaagaatagaaaaaaaagctgctagctacaagtggtatgttgtaaagaaacattgagcttaaatgccactgaaattcattgcctcaacttgattgttttaaatgttatatatcttgaatctaaatttttagaaaactggtaactaaagcatcaatagcatcaggcagtatcccagtgaagcatagaattctgccctgcattcatcccctttaaacatgctaaacatattaaaatcaattcaagaagaatgctttgtaggatacaaaagtacttagttaagagattcttctgcacgggcaaatcaatctttttctttgcactttcagaatgagttttgaattgactagttcccgcaattgcaaatctggctgtaagattctctccctgccatttaaaataaatagatttttaaccaacagtaccctttaaacaagggtttaattgaaggaccatacacccatgtatacttcttaaatgcttttaacatttattaaaaagaaaggggtgacaatctattcatatttgctcagaacatgtttgtgaaggtgatactaactcccaagaaaaccttgtaccagtactataacataaggcaaacaaaatctactttatatgtagaatttacacaaactcatgcacatccatgcaaaccaaaggcaacggttatagaacactagcaacagtcttttcagttgttgtcaatcctattcctatcattttcaaaattcatttttttttcacaatcatgcaaattgtccttattccaaaaatgaacaaatgaaataagtcaatttattttgaccaacacatgcaagaaaaacagaggtatttcagtttactataaatttattctttcactttaactaacacacactttggtatggatgaagataaagaagaaattgatgatgtacctcaaatggcattttggtaattggatcaagatccccttttgctattctttgtgctatatcttttggcatgggtgtatcccaggttaaggtataacttcaagtaagatcttagatgattgaacaaaatggagcagagtgatattaatttaaaatggcaagagaacattaaaaatgaaggatatgggcctaaaaagtctaactcatcaccaatatcatcagatatattagacaaatgaacaatattttcattaattggatcataaacccgttgatattggaaagtaagtatagcttcttgaatgactcttcataaaagggaggcacagaaactccactatatctcaagtgcttaagaacctgatacattgcaatttgcattagaaatacaaaaattcatatagaaagattacatacaagatttataagatatatattgttataaaaaacacttttaagcatttctgttatgtgtatagatgtagacctggctgcttaagtgagtttaaacagggaaaatgaacattgattgtaaataaacatgcttgttagtttttatggttctgaacatcatgcttgctaagtgtatcagctgcactcaccttgtcataacttctaaattttttaatgcttgcatgggcccttttgagacccatacctggcaaggactgcagataatcacagccactcaaaatacacatttcaagaagcatttgtctgttgaacccttcaaaactaagctccttattcttttgtagcatggaatactgaaactgaacaccttgaccaaacttgtccattttaaagataatctaaattttcaaggaagaagcaggccagtcaaaaaccagtgagtactcaaagtaggaataaatatacactagtatagaaagataacaaaaaacatctatagctaagccagtggtaaacttactcttgggcaaccaaacggtataagatcagagtcttcagttataactgcatcaacttgtccacttattgccaagaatgtcatctgggcatctgcctcgtaaggagcaacaatatactgcaagttctcctgcttcaatacctttcaagaaaaaacaaggttaaatatttagttggggatttaatgtaattattgtattgaatatattcaaacgaaatacatatgtgatacacacacacacacacacacacttcacaacaaccagaccaacgctgatatattgaactcctttatacctgaattagttcaagtgcaatttgaggtgaaatatcaactgctttctggtagcactcataagcagcagctgaatttccatctgactcatgttcaactgcacgtgcaagattatcctttctagccctgcacttgtagcatagaaatatttgattcatttgcaaaagcgcaaatacaatcaatgagattttaaggttcttaaactgcccagaaatcaaagcactcctctttggtgatcttgtaataaagctcataacctctttatcccttaatatcctttagtacttaattcttttggtaaaaagagagaaaactacgaaactcaggccccataacaagatgttgttttcatgggtgctggagaagattggtttttcagtatcttagtttgaaagtattaaattattaatcaattctatccctaaatcattcagtattccatccatcctctgtatttcacattaaaccaagttcattttacctcaatttcagaaacagaaaagcaatcaaacaatgacaaacagcaaagaaaacaagtatgcatttagaacagaagcagaacattgagcaagtcaagatcataaacatggcattactgctattttcaacaaattgtgcttgtgaataagaacctcatgtaaacatgaagcatacatggagacagagctcaagaaagttttgttcaaaattgtcagcttatatcatttggagaattccctacatgcagacccactgtacactgaggaagtgaaatcccacaaagggagaaactaatgcaaatgcagacagctggtacaagcacagcatcaaatccttctttgaattttgaaattagataactcacagagaatcaaattaaaagaaaaatgaaaacggttatgacttgagcacattaagcttcttactctactcaatgtaagactcataacattgccacctcctttaaaaactgatgtttacggaggcttcacactatcaacagaaaccctgcctgataatagccccttttcctcacctatcagtattggtacattataccttaatctaacctataagtagcccttaccatagttcaacgctcaacaaaagcataattgttatgacttgagcaaaagtggagagtccaatccaaaagactagttcgttatgtaagagaacttcatagctagtaccacattactcaacataacatacatgaaagcatcccattaacaattaaggtgacactcaactcaacaaaagataggtttttctttttatgccaaaaaaacttaaaatacccaattaagaaaaaacaaagtacaatgtcgggaagacaaagagagtacctggcacgcttgttctcttgttcactcttcattggcagaagccctccatcaaacactagaataggcttaaccccaaaatggcgcagcaaatttactctgtgcatgcaatactcaatgtgcctaaaacacgccaatgcataaaccaatctcggttaagccattttggggtgccataaattcaactaaaccccctttaaaaataaaaatcgaacttttacgagcgggttactccaaacaaaaatcaaagaaaaacccaataaaataatggtaaagaaaagtgtgaaagggaggttacctggtagtgggcatccctttgcagagttcggtgctgcaagagagggcacctttgtggagccaagagtaggtgtctaccgctacagaacaacccttcagatccttatgtggattggaaccataatcgacttcaatagcggcaaaaaccctgattcccattcctctttctctttggagtgaaattacaatgactaacactacatttcatttcatatatgcactaaaattgggcgcaaagttatattttggcttgggtaatggcggagtttaatttaatatcttcgtttaacgttacttttgtttacatgttttaatttttatataaacattttttagagaatttatataaattttattgatactaaaaaaataaaaatttaaatatatgtatccctaatatatattaaatttggtatttgatttctaataaaaatttatttttaataacctctaatatttaaaattttatacgatatttttgttgaaagaatatgttattttttatgtattgttaatttataatagacaaaatattgtaatgtgattatatttgagttggaattattagaaataaaatttttattttaattataaaatattatttaaataaaaatttaattaaattaagagaaaggaagaagagattactattatatcattttaatatatatcaatttttattatctaaaatacttacataagactaaaatgacactttaattttttttatcaatttgatacatgttgatttattctatttatttatttttaaacaaacaggtattgtcatgtctcaaatactagaagttctaaaattaatttgatgattaaagagagaaaaagataaatttatgaatatgaattcctcaaaatagtattttaacaaaattaataataatatttattaataaaaaatatgtcttaaatataattgctagaaaagcatgtctcaaacattgtttatacatataatactaatgactccaatatataatatgataacatgaagtgataaatctaaaatatttttttattttatgctatgctatgcttgatgcacacaaaataataaatgatattattatgttattttgtttcacacttattagatataaaacaatgataaaataagatataaattttgttcaaaatataaattctctttcattaaaattgtatataattttgtaaaaagcaacttttaatttatttttaatttttattgatataaaattataattttattattttttaattcaatcacactatacaaaaataagataaacaataacacgaaaaattatattatttttgcactaaatattttattataaaggatatgataaatatcaccaaacaaatcctaataaaatataaaatttatattataataaataaatatttaaacttatagattatattttaaatttatgatagatatattattaaaaaataattacaaaaaatatttatgatagataatttaatttgattaagatttttttagttattgataattttttaaaataaaatttagtttaaaaataaagataaaataatatattaaaagagataagaggttaataccaatttctctaaaaattatctttactaaaaaaatccttctttttacgtaagaaaaaacatttcctaaaaattcttaaaaatactatttttaaaaaaatctctaacacacttaattagattaataattataatttaagtaaataaataatttcatttaaggtgttaattctgaataataaaaaatgaaatttaattatgattatataaaaatatgaaaaattagttttatagataattttataataaattaattataaattttataatttaatgttacattagatcacattttaagacgaatttgattaacaatatcaaatgaaactgaaaagggcaagaagaagctgagagagaggggatcatccatccatgtagggaagccaatcgattccttgcgcgtttgcttgcttcgatccacaccactgcactctttacttcaatcttctcaaccctacttattcattcattttccgttaagtaagggtttctcaatcgtactcctccatgctcgtagctcgagaatgctaggttaacgctggcttagcacgtagctctaacctatgaacctccggaacggttaactgtttgttccaaacccaccgttccgcgaagaactcgtacgaattgacgatgtgggcttagtttcgttctctgtttccattctgtttcacttctttttctaattgatctgctgtatcgtttccgtgctcagtgccaccatgcctcgtaaagtaaattacggactcgattacgacgacgattactatgatgatgattatgatgactatgcttatgatgatgccgatgcagaagacaatggttagttactttaatttgctttattttttttttctaatatgatgctttgtttcacttgtatttcctctggtttggtgtcagttacactttacacagcttgtttcacattggtatctgtttagctctgctacattttttccatgcagtttctctgatttggagctgtggttgttatttgttaggtttcttgttattgctactaatttttttactgactgactatttgaatttttacattgtttattgttgatttattttttttctgccgtagcaggaggacctgatacaaagcaagagaccattaagcctggggtttggcaatgctccatttgcacttacgacaacgatgagagtatgactttttgtgatatttgtggtgttgcacgccgtcccttggttaatactggaacttccaacagtaacaaaacaggtaatccagttaatgaagaataattttgtttgttggttgggttttttacatttgttttgtatgaaaagcatatctcttttacactgtctaaattctaaattacactgtctaaattccatttgtggcttagggtgtgggggagggaaaactccgttgatgtggtacatacaattcttttgtcattctgttttgatatgggaagatgggacttggaatgtaaagtttctaaattcttctagctttactaatatcaacacattagtttaaatccgtgagatattttatttctatactccatccctagaaagataagctgagataaaaacttatctgaaattctggtttgtttattacttctaaggctatggcacggttgtagatacaaaaaatagacttgttattctcacagggtaggattagatgtggggaggaagcaaatcaagaatgaagcaaggctttcccgtctctctgtttgttagaaatggcaactgccttaaaatggccatatgaaagagtctaaaagaatgaagctgcgctttcctgtctctctgtttgactatcatgatgctgtatatcttgttcatagagcacccttgagtggatttgagtgcagttcagtttagatggctattgtaggaagaaacaccatactgtgaggtgtgttaggaatatggacagaatactccttataagactttggcaatcctcctcccttgactagcttttggaagtgagttaggactaatccatttctaatatggtacaagagcctattcagtattaatgttgggtcactcaaatgtttagtcttgcaaaactcacattctaaatatcctgtactgggcgtgaggcgtgtctgttaagatgtcctacattgaataggaatatggctaaaatactccctataggacttgggcaatcctattcttctgagctagtttttgagagtgaactagaccctgtccatttttaattaattgtaccatagttttcttgacaatagcaaaataatgaccagcaaatttaaataattgagctaaattgataaacaatactgactctggtattagttatttttggttttaacaacttggagggaatgcaacgctgttcctaaaaactgatcattttgcatcatccagatacaaaaaacgaaaaatattaaactgttacaaacctagaattaggaatggggaagaaaagaaatattttattgaatagtatgaaaagaacaaggaatagccaaatagaaagagcaatctcacctccaagggtttccgcttcacaaagagttaatgctcaatttacaaatgatacccgatagaaatgaaagctttccccttacatcttatttatttaactcactaacccctaattatctaatcaatagggacaggatttctcagtgtttctggttgtttggcaattttccaatttatctttttatgtaaggttaaataataataatttgctaataaaaggcgtagcaggaggatgaggaatcatcaatgaaggaaaaagaataatttaatctttttgcaaatctgataaaaggagaaaatggggagggaggagagtcagagaatatgagaacatgtatctggctgcatagtgtcaggttttcaacaatggccatgatattcctataacctattgaacaatgtctttggtgcagttgaagacataagcaaaagtcctggagcatccaagttggccaggtctctttttcaatcattacaacaacagattcccaaagagattgtattatttccaaagccagatgatggttttctgacagatgacaataacttctacaagcttgaaaatgtccgaggagaatttcatgaaattcataaggcttttagtactcaaaggcatccacatttaaacataggtcttcacaagttttgattcaggatgtgcatgtgactagtttaaacagtttcttctaaatttgatatttgaaggttatgcaatgcaattataattagagataaaggtcttattagttgaagatcagagtttttttaatgagtaatgacatatcatgatttagtttctgcaagttgtaactccttgcacatgtgagcaaattacttatttattcttttttaaataatagttataaaaccatgccttttttttttttttttgtatacagatcctttcaagtttgatgttccatccccagatgatgtggtttatactggcctacgttcttccaaaacgggtttgaaaggtatccttccctcaacaaatctaatttgcctatagagctcaagttggacaaaatgtgtttaatagttgagagagctactaaccatcatttaacctgaaagctcaatcatttttttgtggttcacttcaatattttctaaaaactttcaatccctcccccccccccccccccccccccctcccaaaagagaattatcattatcagggaattgattaggctttagctgttcaatttcaatatgttccctattaaagttgtgtccttgaatcaccctcgaaaagatttctaattcctggaggttgttttaagtccaatggcaggaagctttcattgattatgatagtcaaagtaattggaaatatctcaaggccaaactgggatttctaacaaaatctttatcacagtagctttcacccaaaaatgaaaatatatttctaggaaaaactgtttactttttccatattttctgtcttcaaattcttattcgttgtacataaatattaatccatcttatttgtgtaatgctttcagacaaagctacaaacactaaaatttctcagctttcatcaagcatcagagagaagaatgaactttctgtacaatcaaatgctgaaagttctgacaacttatcatccttaacgcaaaagagcagacagggtagttcagctgagagcaaggtttccaaaaatgtagcaattgatctacaaacaagtggtaaaacttcaaacagcttgccagaatctttgtcaaaagacaaaggtaacaatattaataaaataaattctttgaaaaatggtacaattgatattcaatcaagcaaagaaaagtcaggtagtttgtctgcactgtcaaaagtcaaggaaagtgataacattagtttctcttctatcaaagatggaaaaccagaaagtatttccagcagtttcaacaatatggctctcaatgtaagatctggaaattctgataatactaatgctaagggaactcgctcacatgtttcttataagccagaaaaatggatgctccctcaacaagctgaagatacattgactcagctgaatcttgcaattgtatgcaaatggccaattcttttgtacattccaggaaaatatttctcggaatcaatgacactaaattttttggtttgtctattgtaggttggccatgttgattctggaaaatcaactctatctggtaggttactgcacctattgggacggatttcccagaaagaaatgcacaaatatgaaaaggaggccaagttacaggtaatttcactgtggtcatcttttttgtgcttttaaagcttgatgtttctgaactcatgccaatttctgatccttttttttttgttaatcagggcaagggatcctttgcttatgcttgggctcttgatgaaagttctgaagaaagagaaaggggaataactatgacagtggctgttgcttattttgacaccaagagatatcatgttgttgtgctcgactcccctggccataaagattttgtcccaaacatgatatctggggcaacacaagctgatgctgcaattcttgttatagatgcctcgcttggttcatttgaagctggtatggatggcagcaaagggcaaacaagggagcatgcacaacttatcagaagctttggtgttgaccgggttatagttgctgtaaataagatggatgctgttgcgtactccaaagatcgatttgattttataaggcagcagctgggagtttttctccactcttgtggtttcaaagattcttatctatcttggattcccatgagtgctatggaaaatcaaaatttggtggcatccccttctgatgctcgtttaaaaaactggtatatttttttattactctagatgtgattttgactttccatgatgggcaatgaagagggatatagaaggggtggtttttttaatgtaaatttctgttagaaaccatacttttcactctgtaaatttgatatatcattcatggtgtctggggctcaaaagtaccatttgaaacagcactagtaggtgatttctacctcccaactctttggtacagacatttctcaacttcttttctctgaaacaaacaaaaaaaatgtatttagagaggacatggtgtgcttacctgtgcaatgtatggtgatggcttttatactattaaaaaatgggaacctcttgttagaggagtattctgatcataaaccccccaattcccaggactgagtatttagagcataaggtttgcagatactttttggtaagaaagatggatactatttaaattggaaaccgtgcaattggatagaatccatactgttacaatggtactgccctagttaatataaaaacactgatagtttggcagcattcatgatatattataaatttataataggtgtttatatactggcaatctatgcttgcatttagtgtgataacattttagcaacaagtcactttcattttggttttgattgtatgcaatttgtactgctaaaagaatgatggttgtgttcattgtgaacaggtatggtggaccttatctattagatgcaattgactctctccaacctcctactagagaattctcaaaacctctactaatgccagtatgtgatgtcatcaaatcaactacacttggacaggtgtctgcctctggtaaactggaagcgggagctcttcggatggatcaaaggtataccaataaggcaatgttatggctgttatgaaaaatcaaatggtagattaaatttggaattctccaaattaagtgttatttaccgatatgaataactgtatttctgctagacattaataatttttagttaaatattttattctgtgtttttactgtattacatagagagaaataaaaatgttgaaaaaggactcaaaatataattaaggaccaaaaacttgtgagtttaatttatatacagttagtataattttttatacatactttcaataagatttgactattttattacatcatcctatttgttaatatgatgtggggatatggtagatttttattgaatgtatgtgtaaaaatatttcatgctgaaagtgtatataaattaaatcaaaacttattaagcattattattttataaaacaaatgtttacttgatgaactcattgaggaagcaagggatgttatctaaaattttattcaggaaaattgtctagcatgaaaattgagataataatgtctctcaaagggcacaaattttgattttctagctttctacttttgtatcatgcatgaaactatttgtccataactgtaatttttgtttgataaaaaaattgtaggtcttggttatgccttcagctgttgtgggaacagtacgttcattggagcgtgactctaatgcttgtactgttgcaagagctggagataatgtagctgtaacgttgcaaggtgtgatggaaatcatgtgatggcaggagatgtattatgccatccgactttcctgttgcagttgctaagcatttggagttgaaagtgctagtgttggatggtgcaagtcccatattggtgggcacacaggtgtgtactacagatgcgaatgacgttcttgcactttattttccagtttttttttttttattggaggaaaaattgtattttattttttccatctctgcagttagagtttcacatacaccatgcgaaggaacctggtagagtttcagaatattatcagtacttgatcccaagacgggtaaggtgaccaaaaagtcacctcgctgtctcactgcaaagcaaagtgcagtaattgaggtgaataaacaatgcaaaactcgttgtttcaatgatcttcacttttctgtcatctatgatgccgggattaataaaacttagaaggacttttattgtgtctgatttttaggtgattttgaatgagacagtctgtgtggtagagttctctagttgtaaagctcttggaagggtgtccctaagatcaatgggaagaacgattgctgttggagttgtgacaagaataatcgaagaacaaggttaatttatgctattcatcaaataagataaaatgatgataacaaggagcgattctcaactacataccatgcatctttgtttgccatcctagtctagattaagttgtgctcccagacaacaggcagctatacaagtctcgatgaggttatggtttaatatgtgaattatgaattatgtaagaatggtgaagattttttgtatgtttttcaccatatatgtatcataagagagcgtttcttttcaaaagatctagacttatgtaccatagcaactagtcgaccgcgtcggatgcaattgcgtttattctttaatgcccaatcttcagcatagattgatctacatctgcatatctataatcaaattttgggcttggaatggaaatttcgtggtattttccttgggaaaggcatttctttttctactacagtctcttggttaagtaatgtggttgggacagtctagtgaatccctgaatgaattggactaaatagtttttttttttctttttctttggaaggcttgcacaagtaaccttaatggagtcattaataggtatgtttggaaggaaagaaagggttaattttttatttaagagctatataatatttataaaataaataaaagcttaaggcagtaagtttatgtggggcaaagaaaaattaaggccactatgaggaaagtgggctgtccatgcacttggggccgaaatgacacctactttcagttgccttttcgagcaattgtgatgtttattttccatttttgtttttcatatgtatcattttatcaaattagttttgcttgtaatatggtttgatattaaatatagacatttcttaatgggatttgaactatagttagttatgtggttgcactgtttcctaggagtttgagaggattagtcttgtgactttcgcatgtgtgaatactttttttaaaaaaaaaaaaaaaaaaaaaaactatcgttggtaggaagatgctgatttaaatcatataggttgcttgacttctatcatgtacaaggaataataacatgctggtctgcacgtgtaaccttgtttttcgagttactttgccaggatctcaatccatctatagatattagttacctcctttatacctcgaagtctaaatttgctcttgaagaaatgacagcccatattaggaccaaaacaaagccagttaagcatatatctattgtgcattgcacccttcattccattgattatgtggatatcctcaaatcaggcaaaaatttggacattctctggtcagttctgtacaatccaagatatatacagttacatacagacatatcactaatcaatttgtaacaaatactcaaagttattgccccctttaattaaaattcgttaataagaggacatgaattgaactgagtatatgtgcagattccattctctacaatgttttgcctttttcattccctctcttgctcgtttttattctaagacctattatgagctttgccttagaaagaatagaaaagaaaaacttctctatatgaataaagataaagaagtaatttcagtcattgatgaaaatattttacaataatattctaacaagtctgcaattttattatcaactattgatattacttattttatcgaataaaatgagttgctgattttaaaaatgtcatatccattaaaactaataaaataagtaatgacttcaacaaggataactctttgtagcatccctattcataccataccaccatatgtgaccttcccgggaagccacttaattatttgctcaaatcatataattgccagcttatttccttctattgctttcatcagtgcatgaaacgtctagtgcaccaaaagatcatcatggtctctccatcacttatataaactccatataaagagacatcttctcacactttaaactataaaattttatagcaaatatggtaaaatatgaaacctatctgagagtctcagtctattgctggcctctctcttgatgttctcttggagtcactgctgagggaaatttctatgaagatattgagataacttggggtgaacatggtggtgtaaatatactaggaagcaactctctcgtgctttctcttgaccagtcctctggctctggctttcgatccaaggcagaatatctatatggaagaatagatatgcagattaagctgtctctggtaactcagctggcacagtcactgcatattatgtgagaaatcctctgattctgttctcatgttaaatttaactgttttacatttaatgccgttaatacatttcatgtgagaaattctcgtgtgcactaaaccaaccaacattaaataattatacaaatctcgcgccacaaaaatattctatatttaaaaagtgatcatgcatcaattgttaattggcttagacagaagaatccactgttttgtatgtaactttttagtttaataggtatgccctgttagtttagaagtctttacattgttaatcagttttttttatgacttttaatataataattataaaagtcaacaaatttatcatgacacatgacgatttagttaaatcttttattgttatcattagttttttatgattttatataattataaagtcaacaaatttatcataacatgacggtttaattataagtcggataacaatataaaaaatctttagattatctgtgtatctattattattcataacttttatgatgcttttgactgagcttatgtgacatggtgcagttatcttctgaagggccaaatcatgatgagatagattttgagttcttgggaaacctcagtggagagccctacatagtccacaccaatatctacacccaaggcatagggaatagagaacaacaattctatctttggtttgaccccactaaacatttccacacttacactattgtatggaaccctcaacgcatcatgtaaggaacataaagctttcattgtccatcaatcctataatttaattctctaaaattttactttggatatcttttttctctatgaaattatgtttggtaaaaaaatgaaaattttcatggaaccatctatgatccatatgtaatgtataactagaccattgatcctctatgtttcaacattttggctagtttcatggtagataatatccctattagagtcttcaacaactatgaagccaggggagttccatttgctagcagccagcccatgaggctatactccagtttatggtgtgcagatcaatgggcaacaaaaggagggcttgtgaaaaccaattggtcttatgctcctttcaaagcttactataggaactttgatgctaaagcttgtgtgtggtccaaaggatcatcttcctgtccttcaaactcagcttccatgctcataataatacttggcaagctcaagatttggatgcttatggtagaagaagtctgagatgggtgcaaaaatattacatgatttatagctactgcaaagattacaagcgattccctcagggtcgacctcgtgaatgcaggctttctagattctcttgagtgtgggataagtaaatttaaaattaatttgatgatttttttcatttatgtgtatttaaaattccactcaaatacggttgaatttgagtaagttcaatttgattttacttttgcttgcttgaactgataattatatctctgtttatttacttatttttcctattctttctaaacaatgtaaaattattaaaacgaagtgaactcttcattttaaaggtgttccaaacatacaattttatttacaaataagttcaatcccatatttacaatgaaaaatgctaatcaatactcttatgacacaagttaaagaataaaaaataaaaaaattattattagagtgcactgttttgtaatttccaatgtaacctcaacctattttcaataaacttttttatttattgattccttaactagtttttcaagtacacctcgttaacaaaatccttttacagtacgttgaaaaaatgataattgattttttcatcaaatcaaaccaattccattcaaaacgtgagttatattattatttatttagtgaaaacgttctagagtaatttaacagacaactgatataaactctcgataaaaacaacaaaaatgaaaaaaataaaaaaaaaaaaaaactaacaacatataaaaaaaaaaaaaaatgaacatgaacatgaaaaaatcataaaaacaaatctccaataaaatatttctactttaatttcttaattattatccttaggacactcgttagcattttttctataaataaacatgagacaaatgaaactgttcaaggcagtagaaaccacactgctgatcatgatataatgacttagcattagagtcaggttcaacaaattcaaagtgaataacactacttgtgcttgagaaagcttttatctgcattgtgtgttcatgcacaaaaaagaatttcttttgtagatattagagaggtcagaattggcttttgaggcagtatggaaacaactcatgggtcgtctgcatgatgttatgaggaaacaaatattaattagaagggggattaggtgcttctatttagcaaatcgtccataatgctacctttgtagttctggaagcattgaaacaaaaagtaaagttcaagcggtcatcactataatatatatagcaaatcgatgtacagcaaatgatttgatccagagtacatcaaataatgtacaaaaaattcaataatatattacatataaattaaactactaggaccaatggcttcattccctattccaaccataaggtatattaatccataactccaataccttcaagcgacaaaaaatctttcatgtgttacagaagagtatcgactccttgtaccaggcaccacaaatttccccaaacctacaattcatgagaagcagttgggacaaaattttagagacgcaagtatgaaacaaaatggtgagaacataaaaaaagtaatatcagagaaaagaaaatcaaggctacattgttggccactatgtttttttttttacagaaaaataaaaaaaatataaaaaaaggataagaaatagtcgaaagcaaagcacattaggaggaaaacaaaacaaaaagtaataaaatacagcagagcttcccaacctatgtactccaaaattttgccataaaagtttgacctttatctagtagtagaaactgctcgccaaccaaggatcctaaacaaattttcctataagatggtaactgtttcacaatgcaattgcaaagcaagggtccaattgtttctgaaagcagtcactacgtatagtgcctgcgtggaaaggcgagagaaaagctctaagaaaaaaacatttcacaccaaacatcctccaaaagtctgaagcggagaaaacctctaagaaaaaacatttcacacccaaacatcctcaaaaaatctgaagtgaggattacccaacaaaacaacaatagtagccttatcccactcatgaggtttactacatggatcaccatcactaatagacttggttaaaaaccaaattcttagggatattattcaagtgagaaacacccacatgtagaaaattattgctctataaacttttgattgataaacaaaggagtttatcaaatattcaatactttaggcataaaatgcatatctgcacatattggccagaacatataaatgtttgaggaggaggaggagcaaggtagagtagttatcaatagcaaccggaggcccaaaagcacagagaggggcactaaattggtatagatggttgaatgggttgaaaaatcctaaattggcctcactaaaatctcagtcagcagtatcaaaaaagggattctcaatctctgctaggatttatgaaacacctatttcatcccagtgtagtccccatcatcacctcatgcttgcagtctacttaggttttcaatcctatttcacatgaccatctctgttttaaccccacctagcctcacccagatccatcctccatttttacactatcgctttgtttcacactcgcacaaggtttcatgttcaattgtattacactattaccagtttgtgaagtttttatgttgtatcctctacctttgatgtgtgtttgccacaatcagaaaccattcaatcgtgcaagaagtcttgctcttagcagcatttcccttttccaaataacttccacctaaaaaggaccagaatgataaacaatttttgtaaacgaatactaactttcaatttcccccctaaaaaatactttcttgtatcactttggtacattgaaagtttatcaaaagtgtatccaaaatcacattcgttagaccttccatctcctagtatgctagatacactaatcccctagttaacttgtgatatgttattctgttatacacttgccaatagtattatttacataacgggtaagactttttgcacatgcatgtattgcacttttgaccaactgaaattattaacatagtttcaaattcaagggtagatatcagcgaaggattagtcaacttgtgtatttacccattagactattgattaacaaacttgtggtattattttagaagagaaacaaaatcattatacatgggtacaagcaatcttcacggaaacaaacaggcaaaaaataacaattgcaatccacctccaaacttcccaaccccaactacccaaattcagatatatcttggacttggccatatgcaattgaacaattgaagaaaaaaaatggaaaaaattaaattcgtgaagaaaggatttattttagtaggccctagaagtccttgcatcacccatccaccatgtatatgcttgcaacataaagtagcaattttacctctactccaataaactatctcatacttacaaagcaaatcttccagatccacaagcacatgaactctcgcgacacaaaggcaacataagaaataatcactacatacattaacccacagacagaggatgggtgctgcacacaacacaaccttaatcaaccacaacattatacaatcaacattttcttcaccaccttccatccattaagtagcaaagataaataatactcatcaatctatgcatatctcttacatcactttatcaatcaaagaaagaccccaggcataaactagatcaaatccttggacaataactgtatgctctagcaccaagaataactacataaaaataccccagaggagaactgctagcatattgaaaatgaaatggagacccacatcagaaatgctggtaataaacccaaagtggtagtgcttactcagagacataacaagttcagaaccaaagaagaggctttaaaaggaaaaaaaacaaaaaagacaagtactttaagcatcaaaactaaaaccctatgagaatagaaaatgagggagaaggaggaaggggataaaagttacctttagagcagaaagcatgtgctgaggatgtgggtatgaaaaatgccatgggactgggaagagtgagtgagtattcgctgaagaaagctgagcgaagaagagaatgcaggaagctgagaccttatattacagaagtgatgagaggctcttttctttttccgaattccgaggtaatgtatttggtttgaaaatgaaaagccccaccactggttgtgttgtgttgtgtgctgtgcacccattgttttttcttgggtgctgagaccaatggtttaagaacatgaaactttgttcaaacaaaaaaaaaaaatgaaaataaaatataagaagagggtgaaaaaaagagagtaaagtgccaattttttgcatggaattttcatccactgtagttttagtctttaaatttagggaaattaaaaaaatctctcaaattacatttcatttaatctaagtattaaatttaataattgttgtcattttattctataaacatgtattaatattattatttaagtgcatgttccaattgtgtttcattaatataatagaattaattgatgaaagatgaaaatgtcgataacgagttttgttgagcgattgtgaaatgaattaacatacaatttgtggacccagaggttaaaatatgcgatttaaataacggaaaatcaattattttaaaattatatttaaaatgattagaaaatggaaacaaaaccatatataatttgatcattttgagccaatacaaaatcttttgaataagggacgacactatgtatgagattataattttcgatatgaaagataattctaaacaaaaataatcaatttttttggttattaaacctactcacataaggtataatgatatttttgtgtctctatttaattttctcatacttatctagttcttttttatacaaaagtcatgtcaatctcatctttaccaaagaactttcaaatattattttattccaattctcacctatttctcttaaatcaaacaacaacaaaagcataaactcgatctactctaacataagtcacttcacaaaaaaaatgagtacttgtttccggacaaaacattttacttcatttctcttttttaaaattatctcttttctattttcatttattctatttctctcttctaaataaaaatatacataattttaaattaaagtaataaacatatcataattgcaggatttttttcataccttgttaattctagatacttaaatgacaacaagtcacaatttcatgaactaaactcatcattcactaaaaaaaaaaacaatacaaatcgggggcagttggtaataggcacattaatctctggtgtgtccagagaccaaacaagttttaactacagaaaaaatattttgataaaaaaacgactatggaaaaaaattgctttcattttgagatatatttttaaaatgtatatgcccaaaaaaaaaacacagagatgattatatatgagtgtgagtgtgaaatgcacatataaaatgatcgtaaaaaaaaaaggattaactacaataaaatataaaaaatgtaaaataatttgtatgtaagtatgtacatcaaaattaatccattatgtacaaaaaattaataatccatttattaaattacagtacttaattttagattgttgcattcttgcctctaaggacatatttttgtattcctccccgtccagggttatgtggtgagcgatcttaactccaaaaaaagtaatgatagataagaaaactatctaaaatcatttttaaacaaatgacaacataattgacaaaatctaaaaaagataagataaaaaaaaaaagaataagtaaaataaacaactttacctccttaaatgaatccgtgccactaactcgaattattcaaaatgcaatataatctcaaatactgaaggtttatggactattttttatatatagaatatcctaatacatatatagatgtactcctatttttatacccttaagaattattaaacgcaaccttgatattttaagagaaaaaaagcttagcaaaataaagcaaactagttattaatcataatcacccaaaaaaaaagctccatttaaaagtaaagtgtactctacaactaagtataaaacttgatcaaacagtccccaaaagaacatgatctcactttagggtaatacatggcccagtccattagttctgtcttgcggatcacgatcctcagttactagaaaatcagacatctctttccattggacctaatgacatatagatacggctaaattgggattgtataaatttaaatcttatcatacttcattcttccaatatgtactaccacaaacatgaaatgatcatcaacaaagacacatgtattccaatcaatcaattacaatacaaaatataaaagtaaacccgtgtctgtggccgcaaagtaaaataataataataataatggaaaaactgtccgcaaagctagtgtcaagagtcacccttgagcaaggacagaccacatgtatattaccccagagcttaacaccttgtttttcctttttcttcattttggggtaacacttccatcaattccactatccgctacacccctttttcttatcctctttgagcagtgcagtgcaaaaccaaatatgggaaacaaacaaagaatgaatagcacaagatgagtagaacctagtaaacttcaccagccatactgctagaggggattctttgtcgtttctccacatatgcagaaggaaaccatcctgctttgccattgcattcgccttctgaccatcctgatgggctcacctgggtaagcatttggaactttggtaaacatggaggctcaaaaagattgagagattaaaccaaattaatcaagcaaatttcacgatgacatgacagtgatagaagcaacaattgatgactttatacaaacctttcgcacaacaacaaaatcgcccttagaaaagctcagttccttttctgattcagcactgaagggatgcgttgcctgcaagagacgcacccaagatcagttgatgaagaaataatagtattagtaatagtgataaatgataatcatcacaataatcaactgaaagattaggtttaggaatttagcatacttcagccaagaagtacattgttttctctgtgccattctcagaaatacctactggaggggcagattctttcttctgtctatctgagaccatctgagaagaagttccaatgagatgaaaattattgaattacgaaaatgaacacaattcatagaaacaacaccacactcgaagaaaaataagcttaaaatttcaggacagttggttctcacctcagcttcaatttcaccaagaatagctgcaactcttaaatgaaaagtcttttctccttcaacctataaaattataagcacagactataaataaaattctactccctccattccaaaactattgatgtttaaggttagggttaaataagagtaaaatattaatttatttagtctataatacccttaattaatacaggatataaatgtggttcactgtttgttgaagtggtcattaaataggctgtaagtacaatattcctcttaaagatcaaatataattatttaaaatatgagtacattcaatagttttggaataaaaagaaaagactaaacaccaatagttttgggatggaaagagaaaaacaattacaatttggcataaaagtacataaaaaaaatcaagtgttatcataccatggcaacaagcctttgaaaagtaagtctctgctgttgtgcttcaacagcggccaatgccgctgcagcttctttacctagaactgccatgtttgccttcagctcctgcatccttgcttctgcagcatgcagtttggcaacctgttcagcagttggagcttcccgaacccgtgcttgtcttctagcaatctcctctccctgattgaattttaaaaccattccaagttatatgattaagaagaaacaagtatgaacaccaaactctgaagtgaatgtaaatatgtaatagataagaaccaaggattcaccaaaaataaaaagataagaaccatgttataaaatggtagtcttcaattcatcaggaaaaaaaaatgaaagagaaatgacaatctgtgacagcatggaaatcaaagcaaaatggaaaaggcaaagaaaagtatctctcagctaccaaagttgtgagcccaagcaaatggctgaaagattcccaaaatgcagtccaccacaacaacctctcataaaagctatttctaacacaactacatccactcaacaatcaacataacaacctcctctcatatttgaatcctatagtgtccactctttccttcttgaataaactcccatatttttggtccatggcctaattgacccagcacctgcccatatcttctttgggctcaacttctcaagctctatcaacattgttatcatgtaacagctatctggagtctttctttatcaataatttcaacatatattgtttctgcctttctggtttatcatgcatcaaacaaaacatgaatcataaacttcactattcattccattccatatatgagaatgagatacagagttcgaatcacaattaagttaaaggttgatccaagagcagagctactaatccattctaaactttgacttacttgtgcctctgcttcttgtctcatccgactatatcgttgagcaagatggcgagcatcctccaaaggaacaccattgatcatttgcctcaaaggatccaatacctggaaattgaaaccattggattcatgtttctttccttatacatttaaagataatgcaaataataaattacattgacctcccttgaggattccaaatgtcatatagacttcctctgtagtatcaaaacatacaaatgttccttagattttcaccttttctgaagggtttcaagagtggcacatgtttgatcaaaattaaaaattgcgctatgtatggcttgaaagtaggaggtcaatgcagtatttaataaccttaagagatatcagtataatttactttaacatataaaaaaaagtataagcaaattggctgtattctatcttccaaactatctcctatgttgaatgatcagtttgatactcataacctagagatccacatcagagtttttttaaacattagtgtcttgttcatctgaactaaaactaaatttcacactgaaaaggtcatgcaaagtaatattgaaatggtgacctggtcccccatgcatatcatacacaaacagtagcagaatatggctatttatgaattagaatatctaaatccagcctcatttatggtcaagaaacactatatactgaaaaatatagttaaaatagcaacatggagattttaaactcctctgtaggtcaatgaaaagattctattactgtttcatattttaagcaccaattctttatcaacttttttaaacaactacttactcagctaatcattcacttgacaattagaacacaaaatttggtcattttaggacttcatcttactttattttccagtagactcttcaatatgattaatgtacaatagaaaaaacatgacagtgattgcttacaaagaatgccctagaaattgtagtttagtacagtaaatatcaattgacaatcaacatcaacatcaacagcacctttaacccaaattaattggggtcggtggtagatgaacccaatgataaatcgaaaataaagcaaaagagagaaacagagttaaatataaaagaatggtgagaggagaagagaaaagaggaagaaaagaattaaaacagggaacaactggaacatagaactactaaagggtttaaccctccatcagacttatagcttttctccactccgtcctaagacataccgtccgccaatctaaatcccactccattaggtcttgtttaactacctttccccaggtaagttttggtcgacctctacctctctttgtatctagctcttggtaacatactcttgttctaacaggagcatctaatggtcgtctcataacatgcccaaaccatctcaatctatgctctctcatcttttcacatactggtaccactgatacctttcgtcgaatatcctcatttcttatcttatccatcttcgtgtatccgcacatccaccttaacatcctcatttctgctacctctattttatgctcatgttgcctatgtgctggccagcattccgctccataaagaattgccggtctaacagctgttctatagaattttccttttagcttaataggaatcttgcggtcacacaaaaaccccgatgcactccgccatttcatccaccctgctttaattctatgacttacatcctcatcgatctccccacctttttgcaacattgatcccaaatatctaaaaacgtctttcttgggtacctcttgcccaagcagatgcactgtgtcttgctcaccgtctttaatcctcgaaaactcacacttcatatactccgtcttgctcctacttaccttgaatcctttagactccaaagtgcttctccacaattccaattttctattaacgccatctttggtctcatcaataagtactacatcatctgcaaagagcatgcaccacggcacttcttcttgaatatctttcgttagttcatccatcactaaggcaaagagataaggactaagagctgaaccttggtagacaccgaccgtgatagggaaataccttgatgttccattacaagctttcacacatgtggtagccccatcatacatatctttgattgcattaatatactttaatgctacctttttcttctcaagagtccaccataagactttccgtgggactctatcatatgctttctcgagatctatgaacaccatatgtaagtcttttttcctttctctatacctttccatcaattgtctcatcaggaaaatagcttccatggtacatcttcctgacataaatccaaattgatttactgaaatcttggtctccctccttagacgatgttcgataactctctcccacaacttcatagtatggctcataagtttgatgcctctatagtttgaacaattttgaatatctcccttgtttttgtaaataggcacaagcatacttttcctccaagcatcaggcatcttgtttgtttgaaaaatcctattaaaaagattggttaaccattttattgccacatctcccaatcccctccacacctcaatagggacatcatcaggtcctaacgctttattattcttcatcctctttaaagtctctttaacctcatatgtattaattctgcgcacaaatcttctattcagatcattagaaacgtcctccaattccacctcactcttgtcaccatttccattaaaaagattgttaaagtagtgtaaccatctttcacttacatcttcatcccttaccaaaagtttttgattttcatccttgatacatctaacttgggtgagatctttactcttcttatctctcatctttgcaagtttataaatacctttttccccatctttgctcccaagatttttatacaaatcatcaaaaacttttcctctagcttctcgcactgctttctttgcatcttttctcgctactctaaatttttgcaaattctcctcattaggacatttatgcaagaagtatagaaaaaaaattcatatttcattaaaaatatcgtttagttaaaaatattgtatttttctttcaaatacatgcattgtttctaatattattaataaacctagtaattattattattattcttgaaagttgcttttcaaactaaaattactcaaatcttttttatgttacatactaaaatcttatttgatattaactatgttatgaaataatttgaatgattttgtcattttatatattgacagtaaaatgctagaaatactttagactttcttataaaactttgatcaataatttcgtaattgataataaaataaaatatgacaaatattaaattaaatgttaaagaaaaatatagaagagagcacaaaacagagagatgaaggatctgtattagagagatgaacaatgcaaggacagaacagtgaacagcacggcagcaaaggtcgcggttggccagaaacagtgacaggttcgccagaaaatggccataaaggtcaggaatgactggaaactatggagaatagaagctgcagaggttggggatggcaaaaaactcacataaggcccgaaaatgcagggaattgccaaaaatgttgccagaaaagggtgtcttggtggaaaaaggataacaatatgtcataacagtgtgtgtaagtaattgagaaagtagagtttcagttgtgattcaaagaagggggcaaaatcattgcccactaaaacaccctaaataaagttgtttaatggttaaattaaaataggtttttttgtgacccactccaataaagcctgctccaggagcaatttctgctattttgctagatatgacagctgtgatggtcgctactgatacacttttcaattttcatagcatgctctagccgctctgcaatgcaattctgcgctagcaccactatttgttgctattggcaactagtcatataaaaactgaaaataattctttacgtgaaatatgttaaatacattcagcacattgctgatactgaatgaataaagcagcaactacttccctatctgaataattaaatgacataatttcctttggtgtcaccatgtttagcatctaaatgttttaagttttcttaattaaatgagtttttcagcacttaaaattataatcttttcaagcaaaacacattcgacgtataattttacaggtttatcaaacatgcctttaatgtaagtaaaccaactcgtgcatataagaaaaccaaaagcaatcaatcacgaacggtgacaaggcatctcaaacctgctttattatcttttttgacgcatcttgtaatatttttggctcagtaacgactttccgcttttgggcttcactgtttgaactacccctacccacagatgaaactggggctaaaggtgacaaaacaggtatttccaaagatgactttgctatcgaatgtgtagaacttgaaattccctgaaaggaaaacattcaagtaatacagtacgaaaaatgaagctaagagggtatgatcatattagcaaaagcaattcatacagagatacaaaatagtaaaaataagaatcaactcattagtcattggaaaataccaacatgccaataacaccatgcaatttgaaaagaggataactaaaaattacctgatacgtcgtattgtgatgttcatttagtcgagtctcttgaagtgcagctagttggttcatcatgtcagcctcctcgttaattggtgaaaaaattcggtcaaaataattgggtcgaccagcatctccccactctgctacattccatttcaatgcttcccaccagatgctttctcctttgatgatcttcaaagatttgcttgacaactctgatttggaaagactttggagacttgggcaataataaaatatcatttcttctataaaaggtccaacatgtatgccattgaaaatgttgaccaattcaggaagatagagaagcgatatcattctcaacttggggaggaaaaacactggtttttgttctggtgtggcatgacttatcagggtggttacttttggacagtcttcaataataatctcctccaaaaaggaaagttttttaagagaatctaaggtgaagatggtggttaacatggggcaagtgtgtaatgctatagactttaagcagagaaagaagggactactcccttcgcagacgcttcttaaattcttcatatagaatacactcaaaaacttcaacattagagaagctggcctatcaggtgaattgcttccactgacaattgtttccatttcattacactctgccaatatgcatacttccaacccccataaagacaaccttctttgacaatattttaaaaaaatcatttgtatctggaaaatatagttttatgaaattacaacttaaaacttttcaagactggagttaaaaaactgacttaattgggaaaaagcacagagagtgatatgtaataccagtgcacagctaggaatactcatataaattaagatgtggctaagagataaaactaatataatcttgttttgaacttgtacacctgaacaacatatgaaaagtccacctgtgtagataaaagccgatttaattcttcgtgctccttttccacatgcttgcgggcatcaccatatactgatgcagccttagctaatatgttgtcactgttgttctctgctccatatttacagcaatcctcagaaagtttcgttcctgtctaccatgggtattgtttatgaggatttaatcaaatcataagtcgataaacaaaacttacaggtgcttctcattcctgaacacatgctatcaagacttgtcaaagtaaactgaatttgcaggaaaaaaagaaacaaaagctaattttcacctgtttcaatatgcttataacctatagctgtaaatgtttctgctgctttaacaatttctttctggaagtcctggatcagaggatagttttacgcacatcaatatacataaccaccacgaaaagacaaatcatttaagataattttttttatgaatgttgtatgacaactactacaactgtggttcagaaaggctgcacagccatgtttaagttaactccacccccaggttaatttatacattccccatctctctctacatcacttaaggtaaagctgattaatagaccttccataactaacatgtattccaagagatataaggttaaatgtaggatatcaatgtttggggtaatgacagcagctacaagaaaatcattcaggataactacccccaacccttcttttccaaaacctctttacaaactgccaaatccaagcttgacataaaaaatggatttaaaagttgttgcaaaaaaaggtttaaaaaaaatgtgagtccataaatctggcaagcacagtaatgtcactcaccatgcatgaacattgaatagacttccctaataagcatatataacattctattttgagttaatatgaaataggaaattccttgctgctcaagcatagcaaagctaacaatcaatctaaacacaaagagaaattgcataccttcccagcacgtgtggccctgtacagcttttccagctggtggtgtctctgcatttcgacctcatcgatgaccacaacatctgaactctcataaccactactgctgaactgctttattactgcctgaatcacaagtacactgacaaagattacaaactagcaattggaaaacattacttttccctgttactataaaagtgtgaatctaaactaataaaacactatggttggttgatccacaagaatgtgccaaacacaaccagggaaataataattcaacatcttgcttaagaaaatgagcgtctccacttaaaaaagccataacattagtcgaactaccccattttcaattgcatttcagaacaacgaaagaagaactaaaacgtcaaaagttatcgccaaatactgggaatttggggtacccagatgcgaatttgagaagagaaacacggtacttgaagtgacaacacagaaaaagacaaccttgaagggaagtgagagcaaacctgttgctgtttggcaacttgctccctgagcttgctggcttgtttcctcagagcgtccatggcagattctttcagctctctattcttaattctcagaatataaaagacagacaacaaagtatgaaatcagatccaacgaatgttatctgagaacccagccccagctcagctaaacgttgtcaacttgaattatgtcactcttttcccctcttttttcttcggtaaatcccaaaaccgtatgtgtaatatgtaataagaataaaccatatatgcaataaaccatcaatttggcaatgatatatcactctctcttttaaatatattcttaaggtattagaaattatgttatataattttttaagaattgaaaaaaatttcttcaaattaatctcctagtattagtaaaatacaccaatccaaacactaaaataaaattatagacatttaatactttccaaaagagagagagcatttgattttttattaatgaaaataatttagtttctcaactttgacgttaataataataataataataataataaatcaatagttacacaattcttttcctccacttattgataattatgttgtcttaattttgaatcttcccaaattacgacatcaagaatatgatctaatgtaaatagtagaaattaacgaatcgatatattttaataaaaataaatataaaatttaatataatataaataattttttaaattcaaacatataaagtttgtatctacagaaaccactttttacaataatttatagcatataaaatggccatttgaaattaagaagacgttgctctaaattttacattattaatagttagttacgcgttttagaagattattttcattaaaatggtttccgcttctgaaaggtgttgttcattaaaaaataaccaattaaattcagtaaaataaataaacacaatcaaaagaaaacctatgaaaatccaaaagcagatcccagaaaaggtaatttgtgattttaattaatgattaccataaaaacaaatttgaaagtttgaaacttttctcggtgggaagcttgaacatgacaatgatatgacacgcttttcacaagcctaataattctctttgctgtgtcactgcattgcaacaatatatattcagagcacaggagaaacattcgtacatacatagctactagcagttcactttcagtctctgtagatttggtttgtgttcatttccccactgaatagtgaggggtagcatcgcaacccaccatcttatttcactctccacatcatgccttcaggtgctaggaagagaaaagctgccaggaaaaagaaggcaaaggaacacaacatcaacccatcaaccaacaacccccaaggtaccatttttcactcaaatgcatgtgcatctggcaattaatcatagatgggtccttttcagttgtgcattatatcttttttttggtctttttgttctattagggtagatggagttctgttaattattcttgttttgtttactttgatttggaatatgcagcagtgattcattgtggttggggtagtcgagttgggtacactggtatttattaatttggttgttttaattgataatagcttgattgattgtgtaaataataggaaatgatggtttgaagtcacgagatgagaaaggaagtgatcgtggtgagggtaattctcctgcatttcatgaacatggtgaccatcgtaatccattcaatgatggaagtgaagatctggaagagagaggaccatcagctactcaaccgtgtgcttctgatgtcgagaccctggaagaagtccctagtgatacttcaaaggaatcgtgttatgagaatgggaatggtggcgatacttcaaagggtgaatccctcgctgagaagaactcagaggatgggaattgtaattcagttgaagaggcaattgcaagtcatgagttggttaagtccattgattcttcccctttaaaatgactttgattactgaaatggcaccagttgaggagactgttgattcagctgctaactcttctgttaatttagttactgacatggcttctgtgtctgaggtggaaaagagtgatactggaagtgtgttactagagaagtcagtagtccatccggtagaagtgaccaacgtcgcaatgaagataaacgaggataacacatattccttaaccaatgagaatgtgacaatgtcaagtgcgggggagcctaagccaaaggaatgtgatagtaaaatgttaacttcactgtctactagtcctttaactaaatttaccaatggtgcagaacatattaaggattgtaagactgcaaaacgttctgaaaatcaggttttacattttctcacatatacactacaagtttttcatctcaattatgatttgtaaatttttgtgaaaaactaattttaaatatatttttctttgctgaattaatttgcagcctcatgtagcattggctccaaatttggtgcaaaagacccctggttgagttgctgtggattgtttgaagttttgtcaagttcaaatagataatttcaggtttttcctttgaagttactttaccttgtaaaatcatgtttgtgtgggttctctttcaacttaaaaggttgtgtttacataaatttgctaccctcatgtatgcttgcttatggttgtttttagctttagttttgcaatttttctaattggtttggtaatttgcgctttgtgacttttaaactattagagggaagtttggtggtgttttctttcactttttattgtttgtttgtctttggtgaatgcaggtgtgtcatgggtctttggaccaatttgtagatactagctttaatggtttcagtacaaatgaggatgctaaattattgtgactatcaatccatgctattatatttggtcatttggtgcatttgggaagagcataatgctcatatttttacgagatatgcttggctgagcagctattttggaatgtgattaagcaattagcatcaatttggttttaaacacatggtctttaaggggatttctgtaacatacacggggttaggtaacttcgctccattagtgatttgtatttttctgttattcattttccaaattctttgttatggaggatctcttattctccaattgtcttgtaattttattttcttcatgctgacaccgtcttgttcatgagattcatgagcacaaagggagggtgtgattcttctatacctgtgtgtgtgcatatcattctgaaggtcatactctgttattattctagttcaacttagtctgagcgttatcaaatattcatgccttttggatatggatttaaataattaagatgtacttcttagttcttcatttggtatcaattggttttttaagttatattattcgttctaataatgctcattttggggattattgttgtagtatattgtgtatcagtatacaatcatacattttaaacttgcaaattacgttatgtttgacaacatcttccctctgtttttcttgcagaaatacaagatacaagcatcaagcgtgagtatctcaactgatgggtcaaacttgtgaagatttagaagaattttgtgatattttgatttagattctctcctttaagcttttcaaaaatatagcaggcaaccaggccaaagtgtataatccatacaacttttgtttacattacagtggggtttgtttgtagttattgtgctagcaacaattacagtcttttaaactgatttgttaattctgcgacatggaatttgtcacaatactgtttatttcgccctttctaattaatgtagagcagcagtgagacctagaaactccttaagaaaattcactttgatctttttcatctaatgcacgattctcatgcataaagcacttagaacagtgtttgcagtgcagcgcactttgggtgcaactttaaaagtttatctttaatcagattaactaccagaaccataacgaagcaggactcttcgtgttctaacttatggtgcaatcatacctcggatgtgtccctgttcaaatgtccttagctatcatcttgagaacttcattgtagactgatgaaactttgttcttgccctggtcatggaaatgtccttctttgatatttggtttttcttgtcaaggttacggttcaaagattactctttcatgtttttttgctctagaccatcctgtggataccaactgaagatttcgtaattattgtgtgtgaattgcttttctaggaaatatatcctttaaaaagatctaaaaacctgttgactttgcatacatggtctttgtgtaaaaatgtttgggttttattgtaccccatgttcgttaaagacttataaatgcttatcaaggttatgcagcctgatgtccctatcatgatcaatgctcacagcttactcctaagaaagttggaggaaaagaaatagaaaataaagatagtgttctcctttattgctcttgtaaatggcatattcttgattcatacaaatccaaattccaatcattcaaatcaaaccacaatgctaattctcctttaacttgtatgaattaaaagtcttgattggaccgacagaagagaaaagaaaaagcaagagggagagaaaaacacaagcacaccaatacaatccttcttggccaacaaaaaaagaaattccttcaaccttcaagtttatcttctatacgcagcagcactgtgaatagcaactatgtagaaaagctgtgtagctgaaagtataatgataaaagcctccattgttttctgtaaaattggacatttcagaggcctgacacttgaaaatatactacaagaaagttattaagaaagtaaatgaatcttcctgtcttaccaggcgtgcatttctgatacgaagctcaatctctttccaggcaaagcttcattaatttaattatagttagataattaaaataataccacaaaattatttttttggaggggataaatagaaaatagaaatcatagagaaaagattaccccatggccaggagtgtaagagtccaagccattgtagcaactgaagctgcagatggcaagctctcagcagtccatgactggatatgattgattcctgaaattgctgatgcagcaccaaccactccagcaagcaaagcaaatgtgacaaagaatccagtggatgcattgcccattgggaagaacaagggtgaaaagtgtgctggtagttttaattctggacctgcatagtgcatagtttctcaacataagcaagctgaagaaacacaaagaaaatgattggttacatgagactatgagaggacacataggtacatttggacattttaaattttcatacctataataaaaccatgatctattgctctgttcatggcccatccactaatgcccaaaactatggcatacatgcagaagttcagccccaaaagaagagtggctataggcttcatttgctcattagccatatgtgttgctgtttgttttttggataaggaaaaagctgttttgaactagaaaagtactaggggatttcaggaacctaaaaagcagtgaaggaaagtctataaatccaaggaccaggagctgcatatctttggtacaaatgagagttcttatatatatgagaaatggataaaactgaaggttgggttcttttcttgacaaggctgctagttagctaaaaagcttcatgcaggcctgtaaagatgatgcttcacaatcatacttagacattaaattaaaatatgtatgattcttacttgtctcttatttttaaggtttgtttaactgtaaataccttcccaacaggcaacttcttaggagttgtcaattgtttgttctctgaggcaagtcatattctttgccactcctgaactcttctcattcacaacactctggcccaatccctattaaaaaaaacccttacactgtttctaacaaatttaattatatcgcgcaagtatttattatttagttttatatactaaaaaactttttatttttattaaaacagttgttactatcccaaaaaagtcagatatagaaaaatatgaaaattctaagattagttaaaaaaaatattttgttatttgatatacaatgagacaattacataaatgtcttatattttataattttgttagtaataaaataaattatactatcagcgtttaacacacatttttgtttacaataagtgataaaaaaaatactcatctctgatatattaatatcaatatgattttttttccaaatatattgtaccccttcctttattatcttaaactttatacataatgcctaaatctataaatttatttaaatgttaattgactaaatctgactctgaaatgtatgtgaacaaaatccaagttaaaaaagaaaagaaaaaataaactttacttgagttttatagtaactaccttgaatactaatggtgattcttaattgattgacgtgtaaaagtgtttacactggtcacgtacgacaattaaactcaaaagaaaaatgaaaactctaacaacccttaacttctcttaattctgtaatttttattttatctttaatgtgcaaaaaaacataatgccgatcgacagtattacatgactatgagggtatattccattcttctttataaggtcacaaaaaaaaatgacgttcatcaatatttcttataagttggttaatactataattcgaaccatgcctgttgaaattaatttactttaagaacaaatatattttacagttttcataaagcaataaaaagggatatttctaaaaaaaagtaaatgctcaatcacaaaatcaaactcaaaatctatataaattaattgatataaaattattctaacttaattgagatctcaagttcaatctgagtaatacatcaaataatcgaggtagagtttatgctcatagtaatcccacaagacttgaacaaaattatctccgtgaaaaatacttgtaattcatataaaagtatctcatcgcatgagattgctttaatttaaccaaatgtctcattcaaattttgagtatgcaagtatgttctcatgtgaaggatataaattctacataaataaatttttctgcattatatataccacttttatactaaaaaaaatactttcaataaatttacttgagacccaagacttacattttctacaaagctaagtgctaaccaccaaaaattaattcggtaaagtaacaaaaggaattagctattttaaagcaaaaatatttttaataaacgttacaagagggggaaataacatattaaaataataaaataaaataaacttctcaaataaactaaaataatcttatatgccacaactttttaaaaaaaaaaagttaatagagcttaacattcttaccttaaaatagttttacatttaaaaaagtctcataggttagaagttttcaaattgggccgaatgtatcaatagacatttattaaatggaggagttggccaagctttccataaaatccaaaagacaacaacctaagccaagagaaactactatttgggattttttttttattaattattatttgaagttctttaattattattcaaaataaacaagcataaatctattataacttctgaacgaaaagtcataatcaatttactcttctacttttttaattgaattcgtaaaatattttatgattttaattaattttttttataaatttacaactttaaaatcataaattaattttttaatttttttataaaattcataaattaatttacgacttctcttttttaaaatatttttttaaaattgtaaatattttttatttaattattaataaacacatatattttttttttagttttatttaatatttttatatattttttatatgtttaatttaatatttttatttttttatattgttcattttatattttctatatttttatatggttttatttaatattttcctatttttggtatattatttatttaatatattttttatgtttaattttatatcatattatctaattttttgtataatttttatttaatatattatatatatattttatattttttttttactaatgtaagattattatttttttataaattaaaaataatataaaagattaattaaataaaatatcagaatatttgttactaatattaacttataatttatcgaataatattaaaaatttaattaatttttaaattatcattaagtaaattaataattttgtacaataatattaattaattttattttaaaattattttaatattaataacataaaataattcataataaaaatagttgttaaaaaaaaaaaaataataattaatataaaataaacaatacaaattaaacaaaacataaaaagtataaacaatattaatagtcaatttgcttatatgaaaaaattactataattatgttctttagttctaaataataaacatttcatttaaatttaatcttttacattattttttaatttacaaaataaataataatccttaacattagttaaaaaataaaaataaaatatagaaaatatattaaataaaataatatacaaaaaatatttaaaatattaaataaaaacatataaaaatatacaaaatattaaataaaacaaaaaaagtaaaaatacttttatttgttaaataattaatttaaaaaattatttacaatttttaaaaaattataaaaaaaaataacaactttaaagtcgtaaaaaaattaatcatatgattttaaagtcataaatttaaaaaaaaaaaactgaaaatttacgactttcaaaagtcgtaataaatattatgacttattcacttttgagtaataattcaaaacaaatatccaaagtaattaacaaaaataatcgaccccagttgtttgcctctaagccaacacctaaactgaattgcaaacatccgtagaggcaactcaaaatttgaaaccttgaaagacatgcacttaatttgaaagaaatatatctattacactcgtataatagattttgttattagaaagaaatgaactaatgagtgaatgatataatttattcatcagcactgaatcacattcctctttttcttcgttaagttttttggttctggataaaatgctatgaaaccatttttttttttcattcagaagacacagtcaccccaccaaaatctacagtgtagtacaaaggcatgttccatgcatgcaaaaattaacactaccaatcattatggctgataaacctcaggaagctgaagaccaacactagaagcagattttccaagagtcctttttacttcatctgacctatccacggcaatattgtatgaaaaaagtaaatcctgaaaaattgtcaacaacgatgcatgatcaaaaagccagatggacaaaacgtagtttttcttgaaaatatatttattcacaggcataaaatgagtaaaaataattatatcaatgataggatacaatctgcagaggatttctcccggctcggccacaccttggtgatgctgatcactagtcaaaaaccacatcctcttctgtgcttttaatttaactatatacataccttaactaaagctgttgagtgttgacaccttgtttttaactaaccgagtttgtgtaaatctcatttgaccaataataactgttcaatcaaacttcttacccacaggcacaaacaaatgactatttgaattttgaagcaaaaatgcatcagagagcaataccttgtgatggtgtacactgttaagaagataagtataatcacgagcaagctttattttctgttggatagacacattgtcagacaaattttggttgttacggaactctgaggttacaaattctataaaatgtttcttgttctcttccttcccaatatgtttcttgaccgccttgagaagaaggcgataaatgtgagctgtttggaaggcgtcggatctcatttgtttctatcaatatccactacctactttcctgcataggatgacaagttttaaatataaacatttataggaatcttgtttgcagaaaaaattaaaattagaaacctaaatgatgagagggagaaggtataaaagaaagaaatgctactatagagaataaagaaagattacaacagaaaaaggagtgcaaaatttcatcctaagaaggtgcaaagaaacgaagaaaagataaagaaagttgtatagaacgaggatcttcaattcctgtgtaaactaggatcaatcttgggtttggtagagttcctaattcaatattacgctacagcaattttcttcttagaaaatcccagaagacatgcagagaagaagtttatcctatgtttatgtataaccattccattacaacatgcacttaacacaatttgttgcatctcagaaaatattttacaaatgatgcaactagttcaaaacaacttgacttattgtactaaatggaagccatgataattcaaatttgaagtcaattccatcaacaactgaacagtggaaaatacttataatgatgccatgatcactctgcaagaaatcatcaactcttggcttgaatatgcagctacagctagcatatttttcagattccttgctctgtgaacactgtcacaatgcatatgcaagatgttgcaacaagaggcaactaaattcattaaacaaaaatccaggtgtgtatttgaatggtacatttgaaaatcctaggaaactcaattgcttcaattgaatttccttcatttgtaaaatttgttagtctgaatgagtaatcagattccctccattcataaaattcaatattaggataaagtaattaaatcccctcaataacaatgataattttgatatgttatgtataacttcatatggaatagacaacatagagcttagcctacgagaaactctaggcatatactgtgtgtcatatgatcatatatgtggtctaataaacaactgagaacgaaagcaaggggggtacgtcaaaagaatttgttgtgaacattttcattaataatattgatcatatatggggtctgataaacaactgagaacgaaagcaaggaggctgaaatcacaatttgtttgtggctcccaatgtttcagaacacacatcaaacagtttgtgagcaaaatcaaatatactgcaaaagtaaaacgcaacaatatgtggagcataatggaatgggcaaacaaagtaccatacaaggaaaaaataaataaaagtcagatccacaaacacaagtgggcagttagcaaaataaacagagagcaaataaaaatgaggaataacacagcataatatcatattaagaaacaactaaatatccatattttgcaactatgaaaatgcagaaagaaagttcattgacatttgtagaagaagcgattgaagtactgcaagcaaatcaacgaaaatcaaatcagcgttgcttacttcctttcttactcgctgtggacgaggctgaaatcaaagcgttgctagttgcgtttgcgttgcaaagaaaggtgtctctgcctctagttatctaaacgaacaaaaacttgtttaaaatgaaaagaagaaaaaaaaatgattaaacgaatttataactttcttcgaataattaaatttagcttttatatggaaacatataattttagctttgaaaaaaaaattgtgattgtgggttaaaaacatattgagtattgagtagtaattaataaaactgaacactaaactaattaatctaattgtttgtaaggtttttaatataagttattaaattagttaaaacatattatattttcgaaaactaatggtctaagggggaaaatattttattagaacagtctatccatttatgtgtgtatatttttttgagttaaatgttattaatgtaattgtgtaaaatatttattgatttcataatttctgtcgcaaaattgattaatcacttttaagttaatgcatgagtcgagctggttaatattgctttgtgcaaaactcgtggaaacccaagttggtgaacaccgctttgttcatttaaatatttttaagagtttaagggctttgttaaaaactgctaaacaataagaacctatttaagaatttagtaaaactataagggcctacaaagtaacttaaaaaaagttgatgataattagataaagttcagaaacaacaaagagaataattaaattagaagatgctaatatgccctatcattttagtatcaatagggatgggtagtgatgtccaacaccgagtacttcaacacccatgaaatgtcattgggccacatattaactacaacaatgatttctcttttttctttttgtggggtggtggatgagggtgtcaattgtcaaaacttaaaataactccagtttacaaatgagagaaagtttgagtaacatcaattcaggaaaaattgatagaattgtgtctaagatggtttggacatgtgagaagaagatcaatagagcctccaatatcaaatggaggatagcctactaattagaagtatagatagaccaagaaagactctgtgaaactattaaaaaggatctaaaattaaatggcttagctgaagaaataagaattgcttttggaagtacacaatgactgttcaatttatgcagctgactccacttagtgggaacaggctttcatttttgttgttgttatattaacttgcctttttgctggccgctcaagactttgtaaagcctcctggagaaatttggagtttacgccaacaatctgatcactaagcaagctccattgatctttctctccatattgaaatccatgaaatacatgtttttgctccatttcaatgagtttctttttggctgctatgagatgcttttgaaactttttcctttctttccattcctgacaccattaagaaattatccagaaccaattaaatatttgtatcaattatccacggcaaagagcacccagtcaaatattgatatcaccacaaagaaattattccgaaaaaggaaatttagaatccaaataatacaagtacaaatgttgaagtgtaaagcagaatgccaccttatgaaaatcaaattccacttgggttggtataatgtaagtctgccagcatgacttacatacaaatggaaaaaaaaggtacaaaaatcatatccaaatgatagataattgttccattttttgtgtgtgggagttacagcacaattcacctttgaatggtagatactgagatatgtaacatagcagcaggaataagaacaaaactaaaaaaacatattcagtgacaataaaaactcataaaagtaacaaattagtagtaatgcattagggaagtatggctcactagttggcgcctttcttttttggacctctcatcaaatcgtaaatttaattctaggagtcccttgggcggtgtaacatgcatttctcttcttttcatatcaacatctggaacaatggcttcaacgaaaggtaccaaaacaagctgatcagatgcatcttctgctgatcttgacttgccacttttgtcaagcatatcaaaagatgaatcgagtacaatttgtagtaggtcattggctccactattgaaaacattcacaacagttcccacaagtttttcattttccagatgggaacaagcatggtcaacaccttcaaaaattgcattgaggattacaaaatcacaataagatgacaaaaataccgaagtagaaaattcaaagctcatacaaaccaatataacaatatctttaagttatttataatagtccttttcatttttatcactatattagcacttggtatttcatttgctgaatccttggtacaaagggacagctagcggtcacatatgcatctagaaaagagcttaaaaaaaaggatagttcagttttatgaaagggaacaattatatggtaaacaattggcatttctgttacgatagcacacttgtgagaatcgccaagttaatactgaactccaaaatataacagaaaaacagctgatgaatataagatagagaatttcatttcattagtatttagtaggtgatactttagcaaaactttaaataatgaacaaggaaaggagaaagtggtttgtcttcatatatacacaagatatgtgactaagaacaaaccttcataaaaactctcatccctatcagatcatgtgtataaaattcaccctcctctaattgcggcctgtcttcgtccgtcacaagcaaggtagcaccaataagcatcttagcctgcatgacatattgattagccaaggccaaaatgcatgcatatcatatgatcacacgagccaggtctacataggaaacttgacgcttcccacttgcaaccacaagtgctacatccctttcaaggatcaataaataaaggcgagtagaaataattttgacagtgtaatatctatggttgttattgtggcatcaaactgactttaaaatatgattagtcaatagatgaattcactaaggtgcttccactttcttgaattaacatatacagatatacttaaatactgaaataagggacatttggaagagcttatttgggctaatgagaatagcttacgactcctatataggttcttttcagcttattttcaataagcatgacttatcaaaataagctctttctaacttcttccaataactttcatgatcaaatttattagttatgacaaaagctctcaagtgacaagaactcaatgaataagcactaaattaagtgttgtttaccaagtgcacccttgttactaatcaacactcacttcattcatccaagttcaagatgcacgaaacatggaagagaaagaaaatgaatcagttaaaaagatgagagaaaaaatatatgcacggatagtgtaaagtattttttacatcaccatccaatcataaattgtcacaggtttattgacttttataataagacaaatgctaactagtacccttagagcattaaggactaaaaggagaaagattttattgggatgcacaattcattacacttttttgggctctcccatgattcccacaataaatactttctttttttaattccttaaccaatatcctaaagaaactggttaacaagacccttatacttaaaagttaattgtttctaattggttgagtgtaaaattttctatactgcatagaaattaaactctattgttcgtacacaacaaagatgggctggtaaacaaaatttgtaaaattagacagggtacgaggtattgaaaaacctgctccacggtgtcaattcctctgaatttgagtatccaactcttgagtgcagggtgctctgtaccatcctccagctcaacttcttgaacgctttctccacccaaaaccttgctcttcaaccatcttctcccaggctactcaacaaacaaacttagccacttgaatttccacatttccacaaacacaagaaattaacaaaaatcattacagtggaaaagcgcagttgaggaaaatcggtggcgggcttgatttaataaaagttagtaaaagaaagattatattcattttatataatgaaaacaagtatagaaactaaagaagaaagattatattcattttatataagttagtaaaagacaatttttatttatttaataaaagacaagttagtaacaaaataaaacttaattctataattcaaatattagaattaaaattaactaaaatgatttttcaagttgtctcgtcccatttacaacaaaggactcaaggtactccctatctgtcaatcgcattaagaggtcataattactcaaaagtttatcgatttcacattaaaacttgaagagtgacgtcaattaaataaaagtaacaacttatagttaattatgagaaaattaaaaaatactaagtagccttcagccgttaaaattaatagtgggtagaaatagaatcagaggtaaaaattgcatttgtatgtatcatactatagtagctatagagagaggagaaagaagaaatgtcaacaatggcaatgcgtgtgtcttccacttcaacttcaactgcactctctctcttcaatttcatgcatccgtgtaccttctctctcttgctcttcgccaccatcgctctcctacaccttcaatcctcttaggtactttccattcattctcatctcactctatttcactctttctctttctctcactttgcttttccgctttaagaaggtccttcatcggtcacgacggaatcagaagcagaagcgcagggtttcgtctgcattgctacgctcctgctcctctcaatcctcccaatttgcaatggatctctaccatttcttcagtgtcagttcacttccttttctctatttcatccttttactttttcaattccgctatttatttatatattatatattctgaacatttgatttcatggagttatagactacgcacttttaatattgtatattaattattcggttattttattccactgtctgacgagtggaagaaacatatattattgaataattatttatttctgatcttcgattaatttgccaaaaaaacagaaatgtttgttcatgcatgtaacttaatcttataatgaaattctgcgatgatggatgttcggaaatcggaacattgtttgtagggttttgatactggcgagaggccccgcggtgccgaaatcgtatattgttccgttgtttgctttgcaagcatctgcaggtgtcgtttcctggatcaagtatgtcgttcattcattctgatgttttgttttcttgttcagtttatatgctaaaactgaattgtttatttaacaattcttatttgttcaacaatattttgtagagtattattattcttaatttttacaccaattggatgtacagaggtagatatggtgtatggacagcattcttggcacttctgattcgtctattcttctatattcctggtatgttctcttatccatcacgtgaaatttaggaaatattgaagaagaaacaatttgtactgtagatctaaaagtgtaaaatacaccttttatagccctcattgaagttggtgtaaattaaagcatttttctaggaacctcaggctgggctctatatcttctctttgtataaactgcgaaacatgagaaagaaaatcctggttgtggagtgtaataataagaaaaagttgtgtattttgttttttcatacttgttggataatgattgaacattgaatgaaggaatcattttcttctgggtctttttcatttctaggtgaacttgagttgccatttctggcattgctcttggtgatggtagctccatacaaggctatgtaattaaggtaagcaagtccatctttttgggactttgggctgtcgcctcttttacctttttcaaaaagtaaaataaaatgcttcaacatctttcttcatcagggatacaaaagaaggtgctgggatttcattgttgattgcagtgtatctggctttccagcatttcacaagaacaagcttacatcaatcatttgaccaaggttcagttgttgccaccttagctatcatttgtatcactgttgtatctttgttgcttcttatttgagttggctttgaaatgatgtacactgattgtaaataagaacaatacttgttggaatgacgatataaaaaatttatggattatgttggatactcaatcttgtacttttcacttgttaattcaaataatgaagttggaatccgtatttggtatttgtcatagaaattgtgtttagaacatgatgttctttataccatagttattaataccaaatcaaaccatccagttaaccataaaactgtttcaataaagaactgtttttgaaatattcaacaaaatgaatattgcatttgaactgtggcaagttaagcattcaccatgaacacatttaagtgtaaacatgttgaatttggtgtttaaaagctagcatccgatgtaataaagtttttttggtgcttctctatcaaaattgtttaatagaaatgacaactaacaccatcaagccatgtttatgttgtgtgaccacatcccatgtttatatgtcactgttgtgaataaggtagatttttccaaagtagccttctgagcgtcctggactcaacaataacatgttctagaccaaacatgatggttttaagttctttaatgtattttattctgtttagtaaataaaatggcatgctagctgatattaattacaaggattttctatggaagagaagctaatactgtagaaaaactgtctactacctataaatccttttggcttgatcaactaacagccatacatagatgaaaggtataagtaattttaattgcaagacttgttgactctgactcgttgaaattttgcaaaaactgctggaagactgattgaattccagcgcatcacataaagaatgactgaaccttgtttatcgtctagatgtaatttgatagttgaagggaagccaacaggccacatgtgaacagcagcagcagggaataaaatgcagatgtggctgtattggggcttcctgtaggttctgaaccaaagacagttgatccgccaccgggatttagcatgcctggtggagttggggtcatcactggagttggtggacttggtgggctgacaaatgttggtgctggtggtggttgattagtgctgcattggtgagataatatattaggatgtataggattgcatcttcattaatatagggtgaaaaagagatataggtgctgcaaattctcaccttgttgacttggacgatgcgtatttgcaattcccactacctgcgatggagttagatgttattttctacttttaaggtacagaagcacaagcaaaagacataaaacaaagtagaaattgtttacaggcgcagcctaatccccttaaaaaacaattaaataaatgaagcccacaatccttagagtcatgatgtaaggaaagtaagctaattgaggacattcatccgttgctgagaaaggcgttcaacagacagcagctggaccttcatcagttgcttaaagaaaaacattactatacttttttggtacaaaaacattactatagttggtttcgtggaaggggattcattcctgtttataaaataaaatatatattttttaaaatgacttcacttgatgccttgtcgcttgctccacaggtgaaagtatgagttcctggcctggtaagttatgggtaagtagagactgtacttcagaaaatcttagatataggtatgtaaagatatatggttaaattttttaaagctagaaacaagggaagtggggtgatccaactagaaattattgagttatatagtccctcaactgcctctcaagttatagaaagtttgcataagaatcttcattttatatgaaagaagaatagtgacttgagctatccaagctgtactctaaattcccaacaggtctgagatattggatgcatgatggtatgtataggatacttgctctgtgcctgacatgacgtgttacccttaagacatgtaaaacattttaaatatcatggtcacaaccaagaaaattatcacaagaagataatcatgctttgaagttcgatgaaattcttacttggatcattgcttgtaagagatgctgttcctccaaatacacagctggtaggtgctggattcttctggtagtagtcattgaatgcataggaagcatgatcacggacagtgttcggattataacagcttgctcctggttgtattgctgagcagtctgcacctccatacccacaagcatagtcaagagcaacctgtagagctgtgtctgaagctccctggttagcaacacaccattgaccacctgatgatgttggtgttgtagttggtgtggtgggtgttgtggttggtgtggtgggtgttgtggttggggttgttggatttgtgtttggggctgtggggttttgccctgatgtgtcaggtgtttgaggagtgttagggtttcccatatatggatttcctgtgccaggagttgtgggattgacgatagggacatcatctaattgagtacccaattccgatgatgagaagatttcctgttttttgtcatttaatattttggttgttcctagacctggaaaaagaaacggaaatttaacaccttagtaggacaaatgcgaataacttttgtgatgcacttgagctaaatattaccctttctaaatcaatttacgcaaattgcaccaaatcaagttcattacagttgtacaaagaagtgtgcatgcatgactacgatatcttagaactggaaactatcatcatttgtagacagaatttatctatcgaaaaatgattgaagtttaaagataaactttgatcatattttcaattgataaattgtgtacaaaattttatggctcttgatataatggcttgggttgcatatcttctcaatccaaagttggttttgttataaatgcatggaaaaaatggtacctgaaccaaagaaaagacataaggagaataacacgaggtgccagattctagcattcattgctccaggtcggcttgtgcttggactgcaggtgtttccttaagatttattaaacaagggcagctccctgctgttcctgtgaagaggaatttcattacttaaactttttatattttacatataataaaatcatgaagaatcatagctttcttggatcaaagagagaaggaagaatataggcaaacttgagaaaggaggcatgggataattgaaataagcaagcaagagaaggtgcaaactgaggggaaaaaaggtgcatgacaaaggaaaaaggtgaaaggtgaaagggcgatctgatgcttgagagctgcaatgtatatataattaatgtgacggtgatgtctctgcaacgtcctttctcttttgtgccactcttttctactgttttatgggactgaaccaaaaagtaaagcctgagcaagtggcttgccttttgggtttgtaacgaagaatgttgtctcccttctattgtttttatcctccacctcttaacacacaaccacaagtcattttctattccctgaataagtggttcctctggaatgttttcgaagtacgattcctttcctacgaaactcaagttatctactgctgccttgtatcttgtcatgcttaagcaaccttgtctcaaatctaagttgtctattgtaacaaaccaaaaaaagtgtctattgcaaaacttaagtaacttaaactataattttttttttttttttggggggggaataggaaattcagaatgcgattgaaaagattctcaataattgcagtaagggcatgtcaaagtccccacatataaacattattaataatttacttgcaacaatcatgatgagaatatcaaagagaagtcatagtactaattttattcatatatatcaatatattttcatatagaatgtaattatcaattttttagaatattacagtatactaacaattcgtctatacatatttttcatataactcattatatgtataaacattttatacttaatatatatttttcgtgatcaaactaatttatgtattaatatttgattgataattaatttattaacatgaatctgttatattattgttgattatatttgtttgaattaaaaataaaataatcttatttaatatttttgaaaaaataatataaaattgtaatgtgatctcatctcatacaacaaaatattctttatatatattagataataaaatggaaccaaacgattttccttaaatatcggacactgagtttatttcctaaactcctcctatttgcttaagctttaaaataaagtaatttttaaatataatttcttcaaaaagcattttttataagtaacttttttattataaagaaaacaaatagtacaaacgcagttaacgtaagttcttaaatatgtcttaaataaaataaagattttcttaaaaaaaagaaagaaattcaaacaaactagcataagtaaggaaaggaggaaaattactacaaaagcagaggaaggagacaccgaagttgattttcctgaagcttttaaccttgtgggtgttggtgtcttcagttcaggtaatttgtaccctttatttaaaatcaaattactttttcaaatcagatttcgaatgatttaataatcaattttccattgaataatcaatcgagacactaatttaggcatgcaaacttaaaatctctttttttttttttcatatagctgtggaacaaagatttgaatttttaatcgcatgcgaattcataaaatacctatttttttcacgattagaacacatctagtggagccatgcgcaaattaagttcaaataattcaaatatctaattattccgcgtgaaataggtttatggcttaattagttttttagcttttagattgcaagcaataaatatttattttatataaataaaatgtataataaataaaatatttttaaatatataaattactatatttgtttaattcataggaattaaaaataatatcaaagaatatacaacaacaagactatattcaaccaatttagttagatttaatcatgtgaattttttaaaaagagtcatgtgactttttaaatcttgatcgtccatgattaattatatgattcataataattatctcactcttacatagaatacatttttctcatatgatacatcatctatatgtgtaatccattaaatatataattattcttaccggattttttataaaatgataaattagattttcttataagtgttcttcttatcaaaaataattatatcataatatcacatttcgatcttttctaaatcctttataatataataaaatatttttctatattttatttattatactaaaataaatatgtcaaaagaaataattatcacattatatttcaatcttgaattttgaagaaagtaaaaaaaatcaacaaaaataaaaataaaaaataaaagatggggtatcaatgcttggacatagaattataagaccaaataaagttcgatccttttcggccctattcgttataacccatggcctccattgagtatgtttcggtaacctattttgttacctaatacaagtataaacaactagtttttcaaatgtgtgtattttatcccttttattaccttatcaatgtgtatattctaaacctatattataacagtttaatggtgatacactaacaatataaagtagtttttacactataactaattacaaattatcgttgatatgactttttaaataattttaaaaaaatcaacaaacttaccataaatgttaatttctaattggatgaccctataaaactcattacataactttttttttcttcatattatagtacccttttattagaacaaaataataattaacaagtagttagtttgagtataatttaatttagatattttaaataagatttcaaactcgagacttgttaatgaagatagctggggaaagatccaccagcatcaaagatgatcaatcaagttcttctaaagatattactcattgacaaaacttgtgatacttaacacaaataacatggtttaaaaaaaaaaaaaaaaaggaagacaagagtaagattgcgtacaatatccattcctcttattttcacatatagaggagtttatgggcaatgaggtatgtagttgtttttttaaagaaaggcaagaatgaatccatattgttacattgacatatgttataacccttttattatcttagagtatctttagcgtcagatcttgaacaaagatctgatattcattatatctctcaataaaggagatgaacaaatctccaatggcaaatggattattgtagaaaaatcctgaagatttgcataatattcaagaaaggataattttttcccctctctttccttaagatctgaaaatgagatctatcactaaagaaaaaaaataggacatatctttaatcctacgtgacactataaagtccatcaaaaagtggtttaagatctcaatttagaatctaccactaaaatgctcttatcaattctattaagtttattccatgtaccgcacgaccatattggagtgtataaagttacttcaatgtaaaaattaagcaaaatcaaacatgatacctgagaggaggaacacattccacataaaaatgaaattgtcgctacatttcaaccctataattcaaagaatagtgaaaatagaagcagtaatgattcccgatttcctttttcgtcattgtcaatatgtaatgaattctttaccaataaagtggcatttttccatgcacttgaacaatcaactaatacgtctggatacactgtaatattggggaggatgtggtgcgagctaaaaaaaggaacatagtatcaaaaggttcataaaaatgtacaacaaagcttctctatgttagtatgcattaaacccaggttacttcagttctgcactggctgcttgaatacaaactcttgcatgcgtcctagggtcatttcttctcatgtaatatcaactatacacttcatcttgaatggaacggttacaaatattccaagccaatcttgggtgttaggccaatgtatgttaaattaaatgccattgttgccaagaaggctaggcaggccattcaggcatatatctatattaacttgaaattcttgagatatacatagcagcttccagccagcagattcttcaaaagtttcaatttaaatgataaatccaaagcaatagattgcgttggaataccaaagaaactgctttatccctgttgtggcatactgcattttttaagatgtcggtgatatcatcccatgctgcaaaaatggggctcagatcatgcaccatattaccattttgactacggaggaaaaaaagaaaagaaaaaaaaaaaactaattgtacctggaagtttctggaagtcaggctctattccattgccgtttatgtccttgtgatttggtgttacatacttcccaacagtgataaccacaccagatccatcatcaagctcaaatacagattggattagaccctgatagaagcattgcacatcaaagtgtcatgaagaggttgttacaactacactgaatgcatcacgtaattatacatgtgtaagagctaaaccatgcaaatatttttatttttattttttaacaacaagtcactgaaagacatcaatatgattttctgctattatctccctttagtaagagaagcataatgagaaaagaaacccattttatagaagcaaagaaacgctgcacagtctttgcggtacactggtgtggtactccttcaaaagatatacaccagaaaataaagctaacgtgattaaagaaaaatgctttcagatggacatggggttctcataacaaagaatgcagatcaaagtctacattggttgaaccatacagcagtgatggaaaatattcataaaccttgccatatgtgcgttttccaacaagaacggctctacaattatcatgcagtgcagaagcaacctgaaataagtacaacagctatagtgacatcataaaaataagtggaaaatcaaacaaataatatattgagaaattgagctcctcactatttcacttgcactagcagttttgtcatttactaaaatctgcaaaggttcaaaccaaaaagaatcataatccttgtcatgaagtcctcaaaatgagaattccattgatcaatgatatataatgaacactcatacggagactattttaatattcgcttgcatgaccttgctcaatatgacgggaaaacactttatcacacatcaagaataaccttataaaatgatcaaacatatagatctcaacttaattcaaacttttagctagtcatgtgcaaggggtaatgaatttttccagaaaacttgagaatattctcagatgctctttaacttatttatttataatgaatttgtggaattttctaataataaagccttatctcggggagtcagctagattgaccaaatgatgtcattggagaattggacccatcaaaaaccaaattttcaataaatccatttttgaataatggtttcctaaatttttttcaatatatcccattggatccacttttagcatagggtcaccagttggatttctcctcagtcctcatattacccaactatccatcatttcctcaatgggcatgctccacttttgtctcaaatacacacttgttctttttttttttatttctctgtcactcgtccaccttgaccttatcacctctaggctagtcttattgatacccagtagaatttgcctttgaatttaaaaagcactttgtatacttaaccaaaaacacttggattcaaaagcttatctccacaacgcaaatttagacattcaacttatcaactagaaatatatcatctacaaaaaaaaaaaaaattgagcactggctcctgaatgtgcaatttgtatttactcaaatggtggcaataaatcattgacccataatccataacatatccatcatagttttcaatagtaggaaattctgttactgctccatgtgtttgcactcaaatcattacctatcatacataacatattcaccataccatagcttcacgcattgcacaaatctaaaatctttatctgctcctttatttaaagggaaaaaatccacaataaattcaatgtatcttaggttttttccctatcattgtattttggaatatctaatgcttatcttaccaaagtttatcaaatgggcatctagaatcactatttatcagtcaaacaatcaataatttcatcaaatcagatgtctttgaattattcctgccccaatgataaaccaaaaaagaaattcagaagtagaaatagttccaggaagttaattcaatgataaaaaatcagatgtagaaatttttttacaacaacaggagcttgaatcaatggtgaagtatctgtaacaatagctttctgtaactgaggatctcttccaacagtgtagatcacctgtcatggagacattagaaaaggacacgtctaagaaactaaaatgtattcgaaagaatagttgaataattatcacaaaatagcagactttttaaagatcagtgttcctacagtataataaaataaagcaacagatatatataacaatgtctaactctgaattcacatgatagataacagatattgaatatgaaatcataaaaccaaaaaaggatgccaaagcaattggcatgttactacttcaacatgtaagcaactatcaacttggaccattcggcccagaaaaggctgactgtagaagcactaacgcccttcaagctcaacaattgaggggtcgtggactgtcctgcctagaaaaagtcgaccattagaagcatccacaccctttaggctcagcactcaaggctgtgaacagtctggtcacagaggtcaaccgaatatagtgaatggatcgtccaatgtagaatgattgggtattctaacctttggcccaatcacattcaataaataggggtgacccccttagtcacctcaagtcacacaaaaagggcttactagggtttctttgaggactccttagtatgctggacataaagattgtttttgacataataaagacctcattcatttgtaatttcatcagtcattgttttggatgtcacatgataattctattagatatttagtgcttttcttaagggagagtgtttttcacacaaaacgtgagggcaaggagctcgtttgcaccatttcaaaccctaaggtattattgacatgtgatcataaattgaaggaggtaagcaaaacttatcctaaccattacaatcagcaatgagcataaaacgacataccgtgtctccttcatttaggaaaagctttgcaatttcaattccggcctgaacgagttaaacataataactacattagacagttttaaaaagcaaagaaaaactacattcaatagagaatgcagcatcatttatcttgtcatcttatatcaaccaaagcatatgtaagcacaccatgacagaagaatacaaatttacttaaatttctgaaaataagagaatataatttcttcataccatgatgcagttgcaataccttcctgcaaaggcaggttccacatatgcaacagccaatatgtacaatacaagttcttagaatgtgggtttggacctaactcaatcctacaaaatcagcttgtaaggtgaggttgcccctacttatatacactattttgaccatatcactaatcgatgtgggatctccaacacaagtgaatagatatatattcaatttgtcctcaaagctgcacaattagtgactcaaaagtaaagagctccaaagctgcaaatcagttcgcaggttcttttgtggtagacttaaaatatcaaattcaaatatatgattaatttttcttagagagctagtcatctgcaaaaaggtaattcttttaactatttgtgcaacctgaaaacagaagcgaaataggcagagtttacaaataggacagtcagcccatgtcaacctacaacaaattataggtctatatccattggcagatgcaccttatctgttacctacggtgggggcaatcagattttttttttatttgttaatgtatataaaaaaaaattgcccccataaaaaaatttaatctaccaacttggaccaacatcaacatcaacatcaacagcacctttaacccaaataattggtggtagatgaaccaatgataaatcgaaaataaagcaaaagagaaacagagttaaatataaaagaatggagaggagaagagaaaagaggaagaaaaataaaacagaaacaactgaacataaactactaaagggttaacctccatcagacttatagctttctccactccgtcctaaacatacgtcccaatctaaatccactccattagtcttgtttaactacctttcccaggtaagtttggtcgacctctacctcttttatctagctcttgtaacatactcttgttctaacaggagcatctaatgtcgtctcataacatcccaaccatctcaatctatgctctcatcttttcacatactgtaccactgatacctttcgaatatcctcattcttatcttatccatcttctgtatccgacatcacctaacatccataagacattcaatacaaaaactacatgataagcccaaaccatttagccaattctcattactgttacaataaaaaaaaaaaaaaaaaaaacaccacactgcatagggcacaaataaagattatctttatttagataacgattagctaaatatatcttttagtaaaagaaaagatagattaaattgttttcctttacatatctttttgaaaagatattagtattataatatattagattgaagataataaaaataagagataaagaaatattggttaaacaaatttcaaattatgtacaaatacaaggatagacaattcattttcctagaatcacacaaataaacagtctctcttgacattaatgggttactcaacgattgagaagaaggaagaaagtggaaaattttgttgaggcaaaaataacgaagaagtcaatttacttgcttcaagaggtgactacattttcaaaacttccatggtatacttcttttatgagcgtttttttttactgtgttcttaaagaaatcaagattaatgttttttagtgtgattattttaatgaaggatgttacatttcacactaaattagtaatgacaatgaaaaaacatagaacatttttaaagtatgaaaatgcgtaagaacaattgtaatttgtagaagcttaagtactttagatttttttatcatgatatatgtattttgtagtacttgtggtattttacttttgtgaaaatattagaaattatttcttgctcccactaagaaaaatttctggatccccactttctatatccataggcaaaataatgagaaaagttactatggtcaatgaagattataaagaggaccccatcagctcatgtcaaccataactaagtcaatgattttatgttcaagacatatgcagggccatgctaaaaaaacaaatcgaatccattcataaagaaatggtttaatgacaacttacttatacaccatttgtgctacttcaagattaggtacacgtaatatatttaattcataatttcatatacataagaaaatcactactgtagtcaatttcaaagaagtgaatcaaaatggtaaaggtagatagggttatatgcaaaagcaacctgtactagcccaccaagattgtctctgagatcaatatgaaatatgaggcacccatgtcttgaagtcgtttcattgctgcaaaatccattatttttctagtgtcacgtataaaaaagtggaaacaactaataaaagagtccagaagcaattataatacaaatcaatataaggatccaaaaaagcagcagccttactttactaacaatgtatggtattcattcttgcatgggttacatagcctagatgacaattttttatactaacaacataaggtaaataacaaacccctggcagatcaatgtcaagttattcagaggcgaaaggtgtacttaacatactaggggtttttaatgcttgaggcaagaagcacgaaaaagctcacatctgactaagaaagggattacaattgaaaaggaaaacaaaaaatattaaagtattttacattgattttccaatatatccattattcaatcaaaacatttgccgattgtgatcattaattgacttctaagatagacttgataaaagcatagaacagaaccccatagtatattgtatttcatctccatcctttacaagtctgacttagaagtcaattttctctcctcaaaacaatatgtatccgtaatcagttggtctcaaaattaatttagcatccactcagagtaagaattagtaaaagaagacttttaaaaaaaatgctcttattgagaaaacattattattttagttttaaaaaacacatatgaagctgagaaaagcttaccaatgactaagtcttttctggccaatgcattgaactctttgaggcgtatatacccaacaggagtaacaccattgtccaattgttccagccgataaaagactggggtacgagcaacaagttgccgctggacttctattgattcaacgggtccacagttgccatgcttgacctgacagtaatgatctaatattaaacttgaacataaaatttaaactaaataaaactataaacaaaggctagagcagtgccaaactaacttggaattagaatccaaaacctgaatagtcacagatgttccattagggccttgcaacagggatgatacttcaaatgctgattttccctttacctccatgttattgacagccaatatttcatcccccttccagagaaacagaaaaagtaaaggaaacatattatataattcaaaatagttctttgtgcctaccccatttgcttctaggagagaaactaaaggacagagtatattctgataaatggtaaagacagagaaagggaagttgttttgaatggttaaaagaagcaaaaaaaaaaaaaattgttcacctatttactgtaatggataccagagattgcttatgtagcaattataatgcaaagcatgattatttgacatatttatttcattgattaaaaacatagaagtgaaggcaagagagatgtatgtgtagattttgaaggtgaagaagatgatgatttgaagagctgcaaattattaagaatgttcatcatctttgtgtacctgtctaacaccagcagaatgagcaggaccatccaatataattcccagtacctccagtctgaggtctccattttcatcaggaacttccttaaggtttattccaacaccagtcatgtcatacctcgccatcttggagaacttttaacagtggaaaagtccatatgtcattcattaagtaagaaacatgagaagcacagcaatagaaatcaccacaatctatataatctcatacataagaaaaacaaataacagtgaagagaacaatgaaacaagaacgcatcacaagtttcttattgttaggaacctggttcagatttagagaagaaagattgaaaagaatggatcttttatgaaattggagaataatctcctgcagctacaattgtgataattcgaggaatcatagcctcctattacttccttgcttacaagctgccttatgctcagccacccccctcctatttataatttctgaccccttcccaactaactaactaacagcaacaaaatattactatcaatatcctatcaataacctccccttcaagatggaccttgtccccaaggtccaggtaatgaaaaacctgtatttttcagcaaggatctccttcatcttcttcttccattatcatcaacctcagctacttgttcttgcacacatgtgttggatgatatttctcttcacatgtaaaacactcacccttcctcattttctcattcactgttgctggtgacaatctatggatggttcttctaccttgccagccattttcctctgtactaatagtttggacagattcactgtccttactattaactggctgcccttccttcccatttcttgaacccaataaactgggtttcagaaaagtttgaagctctttcctcagttttggtagatttcccagcaccttatgtttttcctccacttgccttgctttcatcatggtatccagcaaagacttaggttcatgcaccctcacttcagtcactatttcttccttcaatcccttcaagaaaatttccttcagaaaactctcatccaaacctctcccagctccaacttgtctttcgaactgcccaatgtactcttgtacactatcatcctgtttcagagccaacaaagcctgaaaaggatttgcaacaccagctccttggaacctctgcaccacatccaatttaaatccttcccaagatcgagtcttgctccactcttcccaccattgaaaccaagataatgcttctccttccaaagccaccaaaacagcttctaatttttcttcttctcttacctcctggagccgaaaatacctttcaattcttgagacccaaccaactggatcatcacccgcgaacaagggcaactccatttgcctccagttgcgcgctactccttcgtctccatccttgtttcgtcccttcctttccttcacgcaaatcatttcctccttttccgaattatccagcgtcgcagccaatcgatgtagtagattctccatcgaacccagtctattctcaatcacgacctggttcaactggttggtttcactcaattcctccattgcgcgttccagtgcttcgattttggcctccatcttcttcgatcccattcacctcacaaagccccaagattggagctctgatactagtgttaggaacctggttcagatttagagaagaaagattgaaaagaatggatcttttattgaattggagaataatctcctgcagctacaattgtgataattcgagaaatcacagcctcctattacttccttgcttacaagcagccttatgctcagccacccccctcctatttataatttctgacccctttccaactaactaactaactaaaacagaatattactaacagcaacagaatattactatcaatatcctatcacttattcactgtaataaatgcaagggcagcaatatcttggaagattcatatgtaatgtgtgtgtgtgtaaatatttctgttaaactatatagacatattaactgttagatttcatcttaaaatcagttggcattaagtgaaattgtccaacatgtatataggctccaccccaagaattgaattgagacgggctatatgggactttccaacactccttgagattcacattgacaagtgactaatgatatgaccaaaatagtatccaagcgtatcctagtagttgttttgtagcttattgcgccacacataattgggtcattattgtgttatcagaccacctgataacgcaaatatacagtcatgcaaactagtatataagtggggcgcaacccttaaactatggagtagctttagtttaaaggattgagttaggctcaatcctaagtttagaccccttccatagatgtctgctagctaaaacaggtgatggcgatacacagagagaggctataacaagtaagcataaaagctgcaccccaggaattgaagcagacatgtgggtctttccaacactaatactattgattaacaaacacagtaaaaaggacccatgaaaaatgacctcatcaggcgagagaaagcgagtataaggatcggccaagctggagagcattcgtttgatgatttggtgcgcctttgatcttgtctgaatggaattgctcaaaatagcttccctcttcagctggaaacaagaagcgctatattagcatgagccatgaagcaaccaaccatgagacactatgagagtaagagtagttgatgttagttacctgccaagtgtcctgggaccatctgtggcgaccagtgtcgagaaaggtgtcgttgacaatctgccatgcttcctcaacgaggccttggttggtgacaacctctggagctgtttggagcgtctctagtaagggcaccacatcaggacaagtttgggaagcagagacagaggggaaggagaagacaagcccgaaggagagagcagcgccgaggagagtgttgcgaaccaagggaatgggaatgggaatgggaagatgaggagctttggagaggaaagttggaggtgctgagagtttcatacacacatagccactcatcttctgctgctgtcttttttctttgtcttgctctttaacattaacatcgtttcagcaatgtaggcgtcgccacttcactcgttccttatgtcatccgtaggtggatcccactcatcatccccaagacgataggaaaatgtatacttttaactcatcaaattttaaaattttaatatttttaaaaatttcaatactttttcattctgtcaaaaatgtttattttcgtctatgttttaaagtttaaaataatcaatttaatataataacgattatcactatctttattttattttaaaattataaaatttgaaaaaatattatcatccatcatcttcttcaaccttctaccatcacccaaaacctccaccccaaatagaaaaaatcataatccaattattgataattccaaattcaaatcaaaatcgtaaaatcatatttcagcttcaaatcaaaatcctaaaaagaatttgaaaaccaaagcttattctctttctctctcacacattatccatccttgttccagactttgtttttctgcgtgctttctccgttgtcactcatacaggtaactcagttgtgttgcttctacctctgcttccacttgaaccaaacaccgtcattggatattattatattgacggtatttgtatgtatgatgtagtcgaggacaatgtcaggtgttcctctcttcaacctcgctcctaatctcactgtctcaaggctctgcttaggttactctcagcctcattcccgaaccatgaaattctattcattcacttacacgacacttgtggttgtgggtggcaggaaccatgactttcggggagcagaacacgctggcggagtcctttcagcttctggaccaagccttccattccggcatcaacttcttcgactccgccgaaatgtatcccgtgcctcagcaccctcgcacgtgcggcatgagcgaagagtatctcggccgttggatttcacaacgaaaaatccccagggatagcctcgtcattgcatctaaggttctcttctctgtctccttcgttgctttgtctcttttctttagctcaacttgttcttattgcaagactaggttgctggaccttctgggcagatgacttggattagaggtggtcctaaatgtttggatgccgacaatatcactgaagccattgataataggttacttcctctcttaattctttctcaattcacaccctacatgcagactaatcttttatatcgtatatgtagagagatgctggacaaataatactagtggaaactgtttcaggtcttttttgctcgatctaaaatgaattgagcttctcctgtaagctaaaattaacttatgcacttaacttttatagaagctctctcgtttaacttctccaaaagtctttttttaacaacccctccaaaaaaaaaaaaaaactgtaaagagtttcatttcagctggactatagaataagaaaggaaaaaatgatcagaacaatagtgatggagttttagattgtgatggctcataatatacactcaagagaaacattaagatgggggtggaactggagaggaggggtgcttgtttggaagagatataagatattattaagtttgcatcttatgattctctttctagtaataaactctgaaagcttttgttattgaatttatgcagtttgtcgcggatgcaaatggattatattgatctttatcaaattcattggcctgatcggtttgtatgtttttgttagtttgaagatttggacatttgtttacattgtttttgaatattacatgttcgtcgacttcttatttttgtcccagtggacgtgcaatatggattttaactcttgaaatgttacaccttgtagttatgttccaatgtttggagaaactgagtatgacccggtccaacaatatgcttcaattagcatagatgaacaacttgaagctctcagtgcagctgtgaaagctgggaaggcaagtggtatttttaaatagtttcaaattgtcaacctgtcactcttgtaattcctgaatcatgattcatgagtatgaaaatgaatgcattttttgcagatcagatttgttggtcttagtaatgaaacaccttatggcttgatgaagtttattcaggttgctgaaaaatatgcttcacacctgaagatatatctttgcaggtttgatcacttaccatccaactccggcagtatttttgtttattttcatcatggaacctcaccctacaattccctctatgaaagtttatttcttacactaatttttttctgtttagtgacagaattcatatagcctgctctgtagaacttttgattctgcaatggccgaatgctgccatcatgagaggtatttaatattattgttagatatgaaatcatttatgtgccttcacccagcaacttccttttaggatggttcacaacatggtatgattggtatcaaagcctctttgactaagtggtctagagtttgatctttgttgaccctattcttctagataaaagttaaattttaggacaaggtagggggctagtgcattgtcccactttaagcccaaaggttgcagagggggcatgttagatacaaaatcatttatgtgtcttcacccaacaacttgagtttctaggatggttggttcacagcaattttaaatataagtttgatattacttgattttggtcttccaaaagaaggtatctaagatattctgagttgttattcggattgatatgaaatgttggggtttggggacataattgagagggcagaatggattaacattaacaagcagatttatattatataaatcagatttaatacaagcagagtcataaaattccatttaatttagatagatggaacattggaagcttaatgcatgaaaatttataagtttactacatttgttggcctaaatcattctcctgcattttctatgaaacctcattgtttataattatttatcttttcagaattagtttgttggcctacagtcccctggcaatgggtatactttcagggaaatatttttccccaggcggtggtccaacgatgctcgtttaaatctttttaaaggttaattgacatctttatagatatgttttgtcttaccagctttttcacctcttgccctccttcccaacaggaaggaagggaaaataaatgttcctggtaagtatgagtttgccaatgatactattgttattattcccagggaagtattcagaaggagaatctaggtacaacttgtccaataaaattataaaggcagctactgtggtagtggattcttgtcagcattgttgcagattgcaatgctaatactttgattagcttattggaatctgatatacatttccttagttttcaaacacattttttatttttgattagcatatataaagttttcttaatttaagagcatacgatgcgatgtgaatggggaaaattgttttaatctgaactgatagccttagaacttaaaaacatgtgcaatagctagatgctaatattcataggtgtggacatttaaaactgaacctcatggttaactgttgttaattagaactctgttcctattatttcttctgtttactgattttaatctccatattcatatatttccccttctgcagaaataccttaatattgcaaaaacacatggtcttcatcctgtatctctggctataggtttgataatcttttcctagatcttcatgtgcaaccccgcatccccacccccttttatattagtgatgtaatttgcatgactccaaacgcatcaaatattaaatcagatggctggtccaccatattggttgatagttgataccgttttacaaggaggagttgctaaattctaatacctaaagtagtttggtagctgcacttgtactgacattgcctttttttagtccccatgcatatgttttaagtaaattcataggtaatcaattacactgcgtatgtagaattcaataatggacagtctgtcaactgtcaacactgatagaagttggtaaattgggataagtcatgccttcaaagttggagtttttgcttcttagtgatattggatgccgtacattggcttcttctaaataaacaagaatgttctgtttttttccttccttttttgtcttactattttaaaaggatgccaaaaaatggtttaatttagtagtatcttatcattgctggagatagttattaatgcacacgcataatgcaattttatccatcatttgcaattaactcatgctttttcattttttaaaagcatccattgactatgttattgttgtggtccttgagcttatccattagaggttgtggacttgtggggcattagtttattttttaattttatcctaattttatttcctgttcatttttgttttgagcagcttttgttttgcgacacccccttgttgctagtgctgtttttggggctaccaaatcatggcagcttcgggaggttctaaatgcatgcaagattgagctcacatctgaagtaattgaagaaattaacaagattcattcaaggtttccaaatccatgtccctgaagaatacaaattattaattaataatatgacgaacatgtttgaaatttaggtaaaaaaatactttttaaaaggataaggattttttattttgctttcattttatttttatctattagatttatattaaaatgtgtggggcaataatttcaacaaatcaaacatttaccatctcattatcataaagaggcagaagatagcgtagtcataactcgtaatacattatacaataatcaattcgcgacccgaaaatcagaaggcgaatataaaaagagagcatgttgaatgatatattttcggcaaattgttaagtatacgcaataaatataatattagtagtatatcaattatcaatcatttgtattcttcgtggatcaatactcctgtgggtcccacttttactccatatttcaattgaaacccacatcgattattcaatgaacaaagaaccaaaactatcttcatttggtttaacaaccatattttcttagttttttaaaatctttttattattccagaatagtgcttagtttatttgcatctatacgctactatgtctcgatgcatatgaaaataggagagagagagagaaataagttaaaatatttctaaggtggatgtatttattcccctaaattatttaatatagaattttgttctcaggcctaatggctaatttggttggagagaagagaaaagaatggaagaaaattaaaaagaaaaagagatgtgagatctaaatcaactgtgacattttcttttcctttcactccaattttttcgcagtcaaacatactataaatgcatacctataaaaaaaaaaaaaacaaacaaacgcatatctcatgtataattggaattgaatattctttgcccatataattactattaacatagcctaacctaaaattagaaagaagatttgaattttaaaggagaagttgttatcctattaacatcgatctgggctgcattaacacatcatttaaagttctaagtgaaattacagtaaaaatgatagttaataatattttactacttatttgtacacttggaaacgaatttaaccttttttatatatagaatttaatattcaagttttttttcattttaatttaactttaaaattatcaattctaaaagaacttttttaaaaaaaattgtatataggtacatgcttaattctttttacgaaccctagtgaaggctggaaataaaattgtatgtaggttataatatgccgttaaagatataataggtaaaggaaaagtgaatttttttataaaaaagatatccctttattttaattttttgaaggaaaagatatccctttattattagtattgtatggagtatattttgttattagtgttattatattgttttaattaattattaactatttagtattttctttccaagggaattattagcatttttagtaaagattctattgctcataaacactataatccgattaaatgaactaagtggagtatattttattcagaataaatactgttatcactcctctaaaattacgttgaaataaaaggatacacacacgcataaattaatcattgttaaaacactaaatcagaaacaaagcccttactaacgaagattttcagtttctcacaaattgttgattaatggttatttccagaaaaaaggaggaaaaaaaagaaaaggaaaaaactccgaagagagaagaggagggttttgtttcgtttcgtcctctttccgtttcgggtgcaaatcattgacaggagagagagagacagaaagagtgcgtgtgagagagagaaccagcgcgcggagagatattttaaacgcggcggaaccctaacgaggcgagcggcggcgggggcggcggaggcagatcggagcgcgagcgaggaggatgagcggcaaaggcggtgggggccagaaggcagggattcctccggcgagtcggaagatggttcagagcctgaaggagatagtgagcaacatgcccgaacacgagatctacgccactctcaaagactgtaacatggaccctaacgaagccgttagtcgcctcctctcccaaggtataacactgcactgcactagggtttttcaatttcaatcacaatcactccttcgaacgtgcctaatcttctgtatgttcgtttctcgttgtgtagatacttttcacgaggtgaagagcaaacgtgagaagaaaaaagaggtgcgttttgagttacctttagttcgttttgtctttatttttgtagatgcttgttatgaggagttactcgagttagttaatactttgtttatgtatttgcttgtgatgctcagtgacgagatttttttttttattcttcagggtaaggacacaacggattccaggtctcgtgtggtaagcaatacatctagccgtggcggtggtgctagggttggcgctgaccgttatgttgggcgtggaggcgctactcaatttagtagtggtggtggtaagcggatgctggttgctatttttgaataatgtttggattaattaatatgctcttaacctaatactttatcaagtagtatttcttatgtcgctattgttgttgtgttgttgcttttttattattgtttttgttgtcatcatcatcatcaccatcacatatgtttggaggtcagattctggtctcctgcagggaaaacctgtattcaaaaaggaaaacggaacacctgcttatggaggtcttactgctcctgcatctagcgcattggacaataatgtaaacaggcaactaccatcctacaggtatattttccttcaataattttgtgcactactggaggaactaaaggaattcttgtggttatgataaacaccagttcgtggttatgatctgtttggaaattcagactgttatttaattgtatttatttctggcatttattatgcttcctccagttttttctgaaaagcaagttagctcacttggttgttaaagcatccaatccaacttttgcaagctattttcaatgcagattcacttcgattcttttctcagacagttggtgcattctgtaccacttattcactggattactctatggttctgctttatctcgtgggatgaactttataaccgtgcaaatgttcatttttctcttccaaagatataagacaccaaactgatcagaaatgtcttctatttgtaaatttttgaatttattataaatattttaaattggtcgtccaataaaatcaaattatctttcaaagtgatatattgtcatcaaattggtttttggaggaagactctgatggcattagtgatcatttaaggatcaatatgatgttgcatatatgttgagtgggccaaagttagtgtttagttgtttactcatttgtcttatttttttcaaacaaaagttttcccgtaagcgcttgaatactgagcacacttttagtatgtaagatagatggagcgtctcatgaatgttcaaaactgctgtagtgattctgtccgtgtctgtgatggtctatcttcatcacaacatggtgggttgcaatctcaatgggcggcgaacccaggtcaagtatcaatggctgacattgtcaggatgggtaggccacaggccaaggcatccatgcctaactcttctgtccacagtggtagccatcagaatgtttttgcaaccccagcaacttcacataccaatttgcattcattgcaaggtcatgcttctaaggtgtcagagacaaataatgaccatggctttgctattaactccaatgttgaacagaatgatgaatggccatcgattgagcatcaaccagctgtttctgtatcctcggttgtagatgatcatctaacatctgagtaccatacaaactcatctaactctggtgaagctaatcagcagctgaagacccatgtaaatgaatttgtagctgaagatgatcatgttgagaatccagaaaatgttggatctgcttctatatctgctaaaagtatatctgaagagaatcccgaaagtacatctgtttttgatggtagcttgtacaaggacttaaattcctaccaacctcatcggcatcctattgaaactaatgaaggtgactaggatgtttatcagtttgcatgtcttgtatgtttatttatatcgagcatatattttttacataaaatttgttaagacttagtgtggataaacttcttgataagcatttgtagaaaaagaatttggaggtaaattaaatcaaacttctcccttaagttaaaagtaaaatatgcaccttagcttttggaaaagtgaagttagatcaaagagcctctaaacaaggaaagaagtttgatttattttacctttttttgttctcctataagttcttattgagaagtttgtgcaaatagggtcataattatcatgtaattagagggatggtactggcacttccatataaaattgctttgaaattccttagttttcatgttgttatctcttttatccacgtatattctgatttggttgattgggctgaatcgttgaagtcatagaaatagcataatgaaagaatatttcaatatccttttacaagtcaatcaaagttcatcattgttgttattgttattttgttgttgttattattattattattattattttgtttttattttctttctcatccttttaacatgtgaatagtttaaaaggagttattttattactaaaatagtcatgtgccctgatctctaatggtttagagagttattataatacaattatttgaagttcattcatgattatatcaaacattcgcctacatgtaagtcctaatttcgtaacgttttctttcagctgaaggtggtgtttcatcagtggccgcgaacttagagcagctaaatttacactcaaatgatcaggggacagaacaagaggaggaaaattcttctgtagtaattccaaatcatttacaactccattctgctgaatgcttaaatctgagctttggaagttttggatctgcaaacgatgcttccctttctggatctgacccatatgcatctaggcccttgaaaagtaatttggaagatacatctggagcaaaggatgtttcaacaattgggtcctcagatgttaggcatgtgcttagacctcagtatactttgctgcactattctggtcatattttacttatgtgttttttttttcttgcagaaaccgtgactttatggcgatgagcatcttactactacctctgatgggaatgtagctcacataactggtgtggatgctgggacttatgagcattcctccatttcacaatcagaggctttaaaatctgaaccccctgaaactgctcaggaaaatcaatattcatttccttcttcttcacacgagtttacttacgaaaatgcccaacaaccgatgttacataccctcattcacagacaagctcacagatacagaacctgtctcccttctctagtgtaatggtaatgcataaattttatatcttatgacttgcaatattcagcatatttcaaggctgggtcttattttgggtgttaagttaattagagttggttctaaaatgatttgagatcttatagtgttaaaactaggggatgatcagtgctgctattcatctctttgagaataaatcaaagcttattctctccaaacaatagaacttgtggtagagtactgttttactgtaataaatactttttcgaatggacatttttaagtatattttatgattgaattgggaattgggcatagaaatgcctccatttggatatttcattcatattgttgggtggtgtatgatttctatcacaggtaattgagttgagtgtgaatttcaatgctcagttgctttacttgtatggcaacttattactacagtaacttgtacttttttccagaaaactataatatggtgcaggaccatttattgctttactgaagtaataagccatatatattatgtagtttcttttatcttctaatattaatatatgttgctattctgctatttgcactaatcttatagtgctattgtttagcaggcttatacaaattctttgcccagtgcactttggcttcaactgttcaaacagcaagggaggatatcccatactcacccttccctgcaacacaatcaatgcctgcaaaatatagcaatattgcttcttcaattggtggtcccactataaccatgtcagaggtgaacttctgctctagcttattttagtttttctatgtacaagcttttgagacaggttggatcataaataaatttaggattacagcttacagagtgttcaattattcttgtttccaagaggatgtgtactggaatttgcatgtacattatgtttgggggctgcagttatataccaatattttggttaacaataagcactaaggatatgtttgcatgtacgtgtattgaataccaactgtccagttgacttccatgtgacatcagttaaagatctgacttacattaagagcatcacaaatcaaaagattatatcttggttcaatcacttgtgtcaaaacggcattttgcatgttttgctttgagctacttgagtgcttactgattagtgtcttcacatgagctgatattttgccaataactgttttctacatatgaacttacaaagtttatattaattaattaattaattattagcaacataagaggatgtattggatgagataaggcatttggatttttatgcctaggtgtcacatcaattgtatcctgtacccattttgtgtttgattcaatacaagtatttctacactctgcagtgcaatcttgtttctttgcctgataaatggctggggatctatctgtgataaatcttgtgtgattccatttccatgtatatacattttattatactactactagacaaatccattcaatgttactagtcattttggtttcccataaaaatatgggtgaaaaatttgtagatgatatatgtatatataccgtgtgaaggtactggtcttgcaatgctatagttatttttaaaaattaagatcctggtgagacaatatgtattaaataaaatgtttatatatttaaaaataaaaattaaatttatcaatatgtgattatcctatcctaacccaagtttcatgctttctcccactgtcaagtcctgtgatacttttatggttggcaagtactttgagggtgttcatatttgaaaacagacggaagtctaaaaacacaaatatggatgtgtatgagtgcatcagtattgaatatggatttgatacaagtatctgggcattacatgcgtgtgaaagagaacacaggatttatcataaatctaagaaataatataaagtcatgggtgcaatttatattgaaattgttttccaatgattacatttgcacagtttaatgttatatctgtatatatgtatcttgattttattgttttttattaagagggagaacatgggtatttggtatcattaattttatttgtcaactcgtaggctctaagagctaataacattcaacacctcaacctaatccacaagccatgcctggtgccaatgttgccactggacctgcacttcctcaacaccttgctgtgcatccctattcccagcctactcttcctctgggacattttgctaatatgattagctatccattcttgcctcagagctatacctacatgccatcagcatttcagcaggcttttcctggaaatagtacataccaccaatctctggcagccatgcttcctcaatataaaaatagcatttctgtcagtagcttacctcagtcagctgctgttgcatctggatatggttttggaagttccaccagcattcccggaggaaattatccattgaacccacctgctgcgcctactagtacaactattgcatatgatgatgttataaactctcagtacaaggagaacaatcatatgatttcactacagcaggtataaagatcttcattttaatgcacatttaactgtttttgttttccatatgcaatttttctcttgggagttgagccaatttggtttcaacagtgcaacctttacaaaatagttattttttagtttttctatttatgcttgtgtaaaaccatgatccttttaaagcatgtaaacaaaaggtttaagatgtgtttcattttgttgtcaacaaattactgtcattttttgttgtgagggaatggggtagactgattttgtgttttcttctgtcagaatgagaattctccgatgtgggttcacggacctagctctcgaacaatgtctgcagttcctcccagcacgtattacagcttccagggacagaatcaacaaccaggggggtttcggcaaagccagcaaccctcacaacagcattttggatcccttggataccctaacttctaccattctcagactgggatttctatggaacatcagcagcagaatccaagggaggcatcccttgctggttctcaaagccaaccaccaaagcagtcccaacaaatatggcaaaacagctactaatcttattcacctcccggtttttaagggtcttgatgtgagtttgaaagtgactggtcacaggcatttccgcggtctaataattaaaatgtgccattgtttggtcccaagagaccatatatggcccgctgctgccctgtgcgaagttgtattctatacaagttataattatgctcgtgatgtttaacttaggtatttaagtgtgctaattttgtgtacaacgcacagtaccctttttatcaacattcttctcatctggttatagtggaaagtttcttggatgctactaccttggattttactcctttcattcttgcccccttcccttttatatatgcatgtctgtcgtttacctgagagttaccttgtattactgtctttgttccttttaaatataatttaatgtttttgctttttattgaaattatctaattttgtattatatactatgtttaatgattattttgtcatttattatttatttttctctttaacttcatgatttataaattgtaatttaagtgaatggaagcatatgattaataaaatagtttaatttttagaatgacattctagcaatggtagtttattgttattattccttccgatcttatttataaaacacggttttgaaaaacattattttttctataagactttcaatatctcgcaataattatttttactaaaatatttttatttattttaattatagttgattgctactcttaattgtttcttctctgttgaagatgaatagattctcaatagtattaaggacaaatttggaaaatattataaatataggtaaatttaatgttaatacatgatatgatagaaatagaaaaaataaaatatatcgtggagtgtttaaaatgtaatctcacttaaattttattgcaacataaaactttcaatcaaaatattacggattgtgtaattttgttttgcaaatccaattcaatatgatgataaatgagttgggttggtttggattaattggatttgaatatttaaaaaatattttttttttttaaaaaataatatttttaataataaattatttttgtctaaattttttaaatatataatgattgaatacattcaaaaagatcaaattgtaaaaatatttaatttatagattaaaatttcaatactaatacaatattcttattttagataaaataaaatataatattagtatgtgaaaatattaacaaaattaaaacaagataagataacttaaaaagaaacaaaatcattggtgttttaatttaaaaatttaataaattatgtgagttcaaaattattaatatattttatatttaataattaatttatatataataaataaactatataatttaatttatatatatattcaacaaatatttagaaattcaactcattgaattggattgggtcacgactcacgagaacaatgaagattcctaacaattataatcaaagtttatatcacaattataatgaaatgatacaaaaaaaattgaggttgtttttcttaatagaaattaaactctaacttgtattatttcaaaaaggaaacgattttgtgtttttttaaaataaaaaaggcatacacatggtattgcaatttgaccgagactcaaggaccaccgctaccctccaccctaaacatagtagtgcagaacaaaaaaagcacctaattatgcatcacaaaaatggaagctaacaattcatagctgttctgttctgttcctatgggatactaccatcacaaaaggaatgaccgtctcatattattatcataattattataatattccattcgcgaccttcatttttctcggagtttcaaggacgtggttgcagtggtggtggtggcagcgacagcaatggcgcaaggcatggcgagtaaccgcaaccggaacgcgagcgcgcaagaagcgcgcaaggtgatggtggtggcggacccgacgcgggaatcggcgggcgcgttgcagtacgcgctcgcgcatgcggtgatcgagcaagacgagctgattcttctgcacgttgagaaccctagctcgtggcgcaacaccatatcgacgttcctgaagatgccgtcgttgggaagctccaccactacgtcgctggaccttggaggagggggagccgcggcggatggagaagggttcgattttctggaggagatgaagcatgcatgcagtgtttctcagccgaaaatgaaggtgcgtgtgatgaagtggagatcgatggaagagacaaggctagcactattctttctctgagcaaaacgcatggggttgatgtcgtagttattggccagaagcgcaatattacttcggcgttattagggttagtatactacttcaaactgctatttaattttctgctggaattattcattcttatcaaaaatgcattgttggaactggattataacgccaagtaactttagattaaggggtttccgctatagcccaacacgggaaacattcagtcttcttctatctcattttcatcccatttttttcttaaaattttcctatttctttttcattctatcaaccttttttcttttctctctatctctctattttccattccaattcaccccaaaatgggattatatttgagatctactttctgtattttcttaaattcttgtctcaatgaagagaaagacagattcaagtattgtttccatagtgtttgattaaagaaaaaggatttttaattttttttttttatttcatttacaagtttaaacaaaggaaatagaagaaaaaaagaatcaaaattcttcctctgtctctttctatctctgctttgatatgagatttgaaaggaaagaaaaatgtataaagtctgtaaccttttgtgactggattatttttaatttgaatacttaatagtagaatttaattagaatgtactaaaacagcctacttttgtaataatttaaaattatttataattaatccattatattaatacaatattagttaattttcttatggtagaatcaattaatttcacgtttggttcatgatcaatgcattaaaaaacttttaaaaggaatttaatatgtgcagtatgtgttgtagaatgctggtgtagaagttaattttatgttgctaacttatattcttcttttgtgtttgaaatttgaatgcatggcaacagatataagcgacctgctggtggatctatgaaaggggtgaaagcgatagacactgcagagtatttgattcaaaacagctcgtgcacctgtgttagtgtacagaggaaaggccaaaatggaggctttgttctcaactccaaaacccacagaaatttctggctcttagcctaaaggcttcacacccccatggccatggatggtagacatttttcattacggcttgaacatatcaatttcgctgaggatagatttaggagaaacttttaaatagacatcatatcatatattattattacattattcattaggcactcaaatcatttaactcccagaaacttacatgggtcacaactaataatttgagtgcttatgatcaataatgtctatctaaaagttattctagatgtagtgaaattggtaagatttccccgtaactttgttgtttgcaaatggtgagaacccatggatgttatcccagattacctaaaaacaccatctactcatcttaaagacgaaaattttctgcttatctcaatgtttccaaggagaaaattctgctaacaaatgtcataaaaatgttagttaaagaattaatcaatagatagattaaaaatcacagtgtgttgcttgataaattaaatgttaaatttttacaaacttttcactatggatttgttagcaagtgttcttaacttactagcagcaatctatcatttataaaaggacatacacttaataatggaacaacactctcattctaagattcctccatgtatgcaaacaccctagcagtataaaaaggcagaagcttatctgaaactcaccagatcacagttctgaaatagacgtggataaattttgttaaaatatttgcacattcttcatcagatttgcctaaaagcaaatctgatataacaggccccaacgcaaagcttctcttgtttaatgttaataagcaaatccgtaaagtcaagccttctatgactgtataaaagaacttcatagaagcagacaaagcaaaacaatccttatttcatttgatctcatttgaatataacagaactattgttgcttgtaagctatgagaaacaatttaatggaacgaaaaatttacttatccctttgaatctttgatttcaacctttcggttttaatttcatgttttagtacacgatccgtgatgagtactcgtgtatacatatgagaaaaattcacatcaagagaaaattaaaagcttaaaaatacacttgccttcataagttagtgcacacaatttaaagaataaacaagcccgttgaattcttcaatcttcattacgcattatattgacgctgtgatgaacaaatcatgtaactccttttctttcaacgggatcaccttcctccacatccaaatttccaccatatgaagttatgagttctcaacataattgaagacgttatagaaaatcagctccaagattatcttcaggaagcaaaagttccaccaacactgtgtacactctaactgttgacataagaatttcatttttcaaaacaccacaggacgctccaatcttgaaaacattcaattgtgtgcaacttacaccaacagttacaccttcgtacttatcatagaaaacccacaaatctaagtgtgtgccatagtttcagttctgagctaataatcactgcaatagaatccttgtaccacagcaagtttttaacagcaatttaaaaaataatctttaacagacgtgttgaacgaaataatcatttcgttactaaccttgtcactcacctccacagccacccaaaacaaagtttcctccaacgtcacactgttctctgtccaaaacaagtatccattcacagttacacactgattactactatattgactacaccactgaatattttcaactcgaacagcacaagtttggtgaaataaccaccaaaacatgcattgtttgtgtttacaaaagagtgttgaaatagaagcctatgagacaatgtggtggcatcttatgaggaagcaaagcgttttgtggttccatgattcgcttggtttgtcttgtagctgggttccaaagaaaaatggtagagctttggtccaaagaataatgaacgacacaaagtaaaccgttacataaacccacaacttgaaacccatgtcagaatctgtgacttttggaacatgaagttgtttgagcttttttcttttgacatctagcagaaataagtgatggccgcagattttgtccttccagtgaaagcgatcgaggattagaagtgtgtctcttcgatgaagcgaagaaaatggtttgagatgaaggacttgacactggtcagcaaggacttcattgatggacttttgagaatgactttgatgtttcttcttgttctaatgaataggaagaattttcatctcatttagaagagttgggtgctaaacatgagaagaaaccttttttttttttttttgaattctgaattttggattatacagtactactgtatcagctctaaagaaatactactagtactaggcttaattttacattaaaaaatttaaatgagcattgaaatcaaaagggtagaatgtgcagaagcaatttggaatttcgaggctgtcttgcaatgtgagtcatattgcagtaattggtgagttgatttcatttgatgaatgatgatggcttggtggaagtggaacaggttttaagattagatcaattggcggaaacagtgaacctaattgatctctgaatgagggatatgataagttacaagttaacgatgattatccacctcaataccatacattcaattttgtttcttaaaaatgaaataatttccatatgttctccttttctcatgcagctaggtgagtaggtgcctttttcatcttgtgagatactgattgacttgagtagaatttgaagggaaaaaaaactcactctgctctgatcacttgagataaattagattagattagtttcaatattttttttttctcaactaactcaatctaatcataatcaagttttaaatttagactatttagtcattaggttgtacacttgcacataattaactattttataaaaaaaacaagattaaaaggagagcaaagtttcatactatattatatttaataatatgtttaatgttatgcaccaacggtataaaacaattttacattgtcattcaatataaatcactatatgaattattttaaataattattttaaaaatcaatatacttatcataatggtgaattataattggatgattgtaaaaaaaattatattgttagtgtatagcccattttttcttcaattatttgtctaatttttaattttttgaaatcatatttataaaaaaaaaaaaaaagataaagataaaagtttggatgtgtgatcaagtttgattgggtcaacatgcaaatcttacctattgatatattaagcttaacacaattgatctatataaattatgaaaaacaggtggtttgaattttttatttttttatcaattaataggatctaactgctagatcctattaatatatggatctaaaaaaattcatcatcacaatagaggggatatcatccattctcctctttgtgaagaattactcaatgtcaattaaattgaaataattctagagaaaattgaacaaaatcataggacaaagactagggagctaagtaaaaatcgtttgagaatcatgtggtaaggtaacaataaaataggggcctaaaactattaattgatcaacctactttatttctcaaacataaatagtagtagttatttagttatattattctacaaaaagattcacacatttcaaaaaggaatcaattatattagcaaaacaataatatcatattccgtaaaaaaggaataatatatcaaaagtacaaatcagatgcaaatgcatgtataaatacagaccttgtctccatggaaaatatcccaaatacagtatggagtaacaatgtaacatgatcaggaagttatacttcgctaatccagatcagtttgaactcatatttcacatgtcacgaatgagcttcaattttcaaatattgcaaaagtaccaaaatttccattaatgtaccccagaaaaataactgcaaaagtacattgtactaaaatcatgataaagtgtagtagcgaaagtagctgataaagtgccctacacatacggctctttcattctatacatacgacaatttcatgtgtatctgttgtattgataaaatcctaaaatactacgactaaagctataaaagactacagaaaataacataaaactgaaatatttcattcattgattaataatattaaagagaatacatttatatagacctaagtatgtcaattaataaataataattatgcaagtgttttttttttcctttactcaaaatttaggagaaagaaatgacgtcccaattcaaacagaaaaaacctattttaacacaagtaaaataaaaattgtaatttataaaatacatatttaactccatcttacatgacccttcaatcattttattttgggcataaaatccattctatcacattgtcactgggttgtgatcaccgaacgcagcagttcgtctcctaaaatcaatctgactttgtttacccattgttctcgtgaaatattttgttcctgactccaaacagattaaatttaatcagttactgcaaatttttaccttacaaattaagcagtggataaaaaaacacaaaacacaataagaacctgaaagcaagacaattatttaatattgatcattactttgaaaatccggtagtcttttgagtaacatagacatttgtgctggtttcaaatggtttgaaacccttgccactatatcgggaaatgacacatatggtgattgaggtttccgtgccccatgtatctctggatctgcacaccaaaaccaagaaatgattaagccttgatccaagcacttgttacaaatttgaaagagaataactgcaactatgctttaatatactctttctaacatattatttattattaatttgaaattattgaacactataaaatcacaggcaagattatttaacagaagtgaaagtcataattttcaatcaatttcagtaaactactaaaaaataaaaaactacttacctcattgttcggagggtccacgctatacgcagaccataactaacgagagagatattgtactcggtcttacccttgatattcaaagagactatttcaaattcgaatatccataaccaacaaatcactaagacacaatttactactgagtaaacaataacaaaattatttaaaaaaatgaactagggaatattttatatacccttaatataattatacttgaaacttataatataatttggatgaatgtgtgtattcatataagcagtccatacaatatgtcttctaggtgctgatatatcatccaccccagtgtcatattgcttagaactaggttggctccttccctaatatcaccttgcatagtagcacatgcctaaaaccatgttcatctgccacggtacacatagcactgtgaattaaatgaacaatttcttagctctatttccacatagacataaaattagttttttttatagacaaatgttagtgtattagaatgtcagttttattagtagagtggataaaattcataacattttttttatcttttcttctttcttaaccatcaaactcaccttatatcccctctcaactctattttcacatagacataaaattggtataacaaaaatagaattggttcatagaaaacattattgcacacttgcacctacctatcaatggaaaaattggcagcaaataaaggaatagcaataccatgacactcgtctttatcaccatctcgtaatggtttcgtattcttcactccttcaacttacattaaccccttcgtaatcgagttctctattggctgctgcatgtttatttatttatttatttattccgatacaataagatgattgatatgtaagtaggctatatttgttttgtgcacttgtaacctcaatatgcgattagcaatgcatgaaagaaagggttgaatatttatgtaatttgtcatgggcatgaacctggaccaagctaaagatgtttccgtgatgaaattatatttataatttcatacccctcagtttaatggatcctctctcatgtgaaaatcttcaccattaactgataattaaaatgacataactaaaatttatttgatacgaaattaaaaaataataatactaagcaatatttttttgctgaatataatactaagtaattacaattacataaaactaaaatttgggaatttaatattgtaacataaaatttaataaattaacttagattttttagggaaaaaatactgcagaagaaaagtttgttaaaaaaaactattacaaaaacagacgtgttcaaaatgagaattttgaatttgtaatataagaatttttttaatttgtaatataagaatgaatatgttgataaatgaaaattgtgtgattccttgtcactatcaagcgtgagtgattctctacattggctttcttaaggctcaagccaaagcagtgatgataaacggtaacagcttccacattgcatttcacaatgcaaattgtgagcacctttttcttttctattatcagtcgtgaatgattttattttattttattgtttttcaccttcctagttcctacttatcaattactgaattgagttgtgaatccgttgtcaaaacaaagttgaagactcccattagatttttttcttttaattttgatgacgagttagcaatagcatccattatctggacgtctctctctctctcccagaaaaaaaaatttccttaattttttccttatgataaataaacaaaacctaattctcatcattgacaataaaaagtttcttatgatacttgaaatgattttatcatccttaataatgatgataattatatatttatcacatttaaaactatataaaaaaacatgcagtagatgtacaatttgctaatcatattaaaattacaagtttagataaatataattttactgaattttatcaacacagttgaacttgttaatcgatgaatcttaacataaaatgtcatcccgaattccattgatcctattcgatacaagttcagctatattcatctaacttactatttttgccgcccgtactatgatattatctatcatagccaggtactattgttacattaacaacaacgataaattatagttagcatgtattagatgttcttatatatatatatataagaatgtgtaagaagatgttctgagctctcataatatggaagaagattaaatggcatcataatcccattcgcacacgtatttagttcttattactaccaacgaaacatcaaaatttcacaacccaaacactgcctcagaaagacatgtacaagcatgcaaccagccaatgcatgaccaaaaatgtttgcctaaaatttgttggaatataaaatgctaagatttaaataaacgctactttcagaaaaataattagaacatttttccttcaagaacaagggcattgaagataaaatgcagataccctctttaaatgcacaccagcacaacctgcaaaactctcccttttctaagcactgggaagtagatgcctcctagattcagttatactttaatcctcatttcgactttcatccttgacaagcttgatcatgtcatcaattcgaaggatagtaatagcagcttcagtagcaaactgggaaaaaaatacaacttatcagacagctgtataagaagaagctgtatcttgaagtcaagaactgttgatatttaactcaatacatacctgaataatttttactttgctcattgcaggctcaatgactccggcctccaagttgtttctaattttcccttccgaaaggtccaaacccatactggggggaaaaagagcaaaataataacaataattagcgagatagaaaagaatgccaaagtttatcaagcatcatttcatatgtattctccattgttacttttctctaatattcattaacgtattcacatgttggaataatacctgaatctacatattatgggcagatgcacaaacttattttacctgccaaattcaacatatcctgccctatatttctccttgcacacaacacccaaataaccaaaaatatggcacatgatattgcaaaatcacgtgagtagcttcatgtcaaatggttacgaagttctgagtgagtgtgtgcataataatcatatacgatgaattaccattccaacacaggttggaagaaatactaatgtttaaaatataatggcacaacaaagataaattcaacaaacagacccgaagctaggaagaagataaatacaaaggaaacaatatagttactattactagtaagcaaataccttgataaatgtttcttatcgctttagtttgtgctgaatggtggtaggcccgtaatttcgcgaccagctcagtggcatccttagcagcattaacagaaagcacctgcaccagttaagtgacaccaacatatacattgtcagtgcttaaatgtttggaaataagaaccaatcaattaaaagtgtctcaaaagagtgaaaagaccaaatatttaaatataaagtcaaaaagtaaattgtttaccacactaaccccacatgaaagtacactagactaaaattacagaatttaattattggacgggagatgaagacaaaactcaaactttacaccatgtgttcaactaggcccaaccaccctagttatttgtaaaataagcagaagacccaaaccttaagccattaatttagcttgtaacttaccttaggaatgattaacagagactcagcaaattctgctatagccaactgctcccgagatcctaacgttgtagcaaggtactccaaataaactgataatgctgcttcaacagcacctccaccagctaccacctgaattttatatattaaaaaaacaagcacaaggaaggcaaaataaaaagacatcatttgaaaaacttaatctaaagcaacattttgatttcaaccaaagtaggattaaagctacgtatgcaggataccatatttgattcaagagttctcttgacaatggacaatgcatcatgcagagctctatccatctcatcaagcatatggtcatttgcacctcttagaatcaaagtgacctacagaagaacacagaatcaggtgataccgcaagctatccacaatgtgcaccagataataaataataaactatcagtgtccccccgtacgagcatgcgtgtgtgagaagatgatgagtaaaaaatatcatatttcttaaaaaaatatttataaatataattttaatagatatccaaaactccttgtgcttttctgtctacaaataatctacaagttaataaaaacttactgcacttgtagttttggtccctttgatcataactacagcatcatcagaaattcgctcctcaacaacctcatcagcagatccaagaaaagatggttcaaatgtttcctccccttccatatcagcaaatgttgagacctgtgtcaaagtaaaaatcaagtccaatataataaaaggaaatagtattcaaaacttctatccaaaaaagaggatactatacaagagactgatgttgcttgacaaaaaatataaactgagatattgttaacacagaagtttggcattaattcaaggaaagtcaataactattaggggaaggataaaaatgcaaattgaaatgaatagaatcgaggataatgattacttctctggttttggcattttattaactacaaattcatccctcgtggttgctaattaagacacgaagctcttcttttttgtgccagaaggtatttaattacaaaagagaaaccaaaatacgattaataaaatgccctagcaaccactatttaagtaatgatcaggcatatataaaagagaaccatcttaaaacatcaagaaacttaaaatgcaatgaaattagaaaaccattttactgccagaatgattaaaagataatgaaaataaatcccttcaccaatagagaccccgggtaagacaaagattaatttagttcaatttaaatttgacattaacaatgttcatatttcagaatgcaaaagggtttcttggatggcaagcttttaaaaatctaagattttaagcaggaaatattcagagtcatcaattgttagaatgcattgaatcagtcgcattcccaccaacccataaaaatagcaacaactagtaaaaaggagttaaaaaaagaaggaatggagccctatctaatcaacactcattatgacaaatattcagctttactgtcaacttgctaacattgcaatttaaatttataaaaagaaaaaaggaaaaaaaaggctaccaatgttgcaccagtagccttggcaacatggcgcatgtcctctttccgcacacgtcttacagcaattgccccagcctcaacaaagtactgaaacaagaataaatgtcagaacaaatgcataaattcatgacttatatgtcattcatcagtaaagaacatgtatcttgaacagagaaccacaaaatccatcaatgcaaaaggaagaaaaccagaagtcatgtttaaagatccataggcacatatgtcaaaaatttggtgtattttcatcattctgaagttagtaaggtcaggcatttattccctaaaaatggaccttggtaactgaattccacaagccacaagggttataacttcaaccttttgtaccatttggtcctcagttttaactatagtccaatacaagtaatgataccgcaatcaaaaaaaatgtataggaatgaaaagaaaattttaagtaaaaatcctatcttctgtcatgtcatgagttcctgggtgtaatgcctcatccgctaaagtattaaaaactccccatcaaacccctaatactcagcttgaatttccctaaatcgataaatccatcaaacaccaaactccaatctaagatgtgaacttcacgcacccaaacagccaccaaacaacccttgtaattgatcaggatgagtaatttatacaagggttaaaacatgacatgctcaactgtcaacagatatatattatcacataatacaaaaagataaagtcaaacactttctttgacagcctaaatgtaagatttataactaaatcctcttgctcgaagaaatatatcgaagaaacataccttaagagccatgtcatcaattcctttagttgtcagaataacattagctccagccttcagcagttttccaatgcgttcttagtcatatcggcctctctgcaattagaaaaaaaggccattagtcaaaatgtattatagatattacttttttttttttttttttttttttttttttttttttttttttttttttttttttttttttttttttttttttttttttttttttttttgtatttactttatcttgcaagatgtatggatggagaattgtcccaaacaaagcaaaagcaaattcccacaatgaaacttaacataagctggcttacaaattagaacaatagtctttataagaactacacaaatcaataactaaccataatattttgagtatttagcttaacagggctttggattgatttcatgctatcatccaagttttctatttatgcctattttatacagctcttagaatgtgggtttgggcctaactcaaccccaaaagctagctaatggggaggttgccccccacttatatattctatctttgtcttattctagccaatgagggacttgggtttttcccaataacagcttattcaataagataatagatttattctcattatatttaaggaaaatgaatccagaaagttgggtatcatagtaatatagaacccatataatcatactgacagtacctttgacgaattttctctagttccctaggatcagtaactaaaacttgaacacccaactgcatttttgtcttctgaagattgaaatcaagacaggcaattcttgcaggggcaccctaagaggcattccttgagcagcacggccagtatttagagcataaccattcatcaaaagctgtctctagcactttttccatgagctttcaagatattgattccctgaagcatgaggcacaaaagaagcaagaaattaaatcaattcaaatcctatgaacattaaagcaagtaagaagcaagattaaaatatatactacagatgttcatattgtgcaaattggcatctttcatccaaaaaagaactgaaatcacaggaattctactaccaaccttgattgggtatttaacttcaccccgagcattggtcatctttacagcttgcactgcgtctacaacctgtgtaaattgcacacataatcaattaatagtgactacttatacctacagtctacactctacagaccaaaaaaaaaaaaactgtcccaaaatagcagttagcatctttttcgcaactaatccataacttcagaaaataacccttcataatgaaaacagagtttcaaaaatcacttagaccatatcccaaaaattcaatttattgactataaaaagtctcctagaccgacaacaaagtttttttcagtttcatgtgacagcacacatactgccaaaccaaatatggtcaacaataaacaattttacacatttaaaacacagtagaaacagatgaaatcaagaaatatttgaactcctttcctctaaagcagaaagaaagtgtaaaatctagtaaggttaggagattttttattttacaaaaatcaggttttaaatgagatgaggattgaaaagaatatagctttatcaatatcaagttttcaattactaatccaactaaatattgatacaagaaacagaaaatgcatataagcttcattcaattggatatgcactagaatttgcagaagcagtagaacatggtgtgcatcaatcatgtgataaaactctcaacattctatataaagccaatgcaattacaaacataccaaactggcaaagaagtcactatcaccagctatcaactttgaggacatactggtcttggcacagttaattagtgaatcctttcccagcttttcaacctaaaagtcaagagaacaatccaactgagtaacacatgatatacaacaatttgcaaatgcattaattaatagttggacataacataacaatggtcatatggtccaaagtaggtttttcaaaatataaaacagggaaccaataaccaagagatgcaagctttcgtcctcagtcctcacatcccaaacttctttttgcattagttaatgattgtatcattgatgcaaggaagacatgaacaaaaaatatgcatacaaaataaaaaagtttattaaggagatcttaccttgacagctagtttttcttctacatatttacaagcctctcgcatagcaagctataaagaataatcatcataaagagaagttagttaaaccatgcaaattcgcaattcaaatagaagaacagaaaaattcataatggtagctacaaagattaaatatagcaatcgacaattaattaagtttaagaaattattaaaagacacttactctatatccactgataatcgaggtaggatgaatcttgttcctgacaaggtcatttgccctctgcagaaaagaacactcacactcgttagttagttacatctgagacaaacacaaagacaaacaaagtgccaaccaaatagagagcgatgcagttactttgagaagctcagcagcgacaatgacgaccgaagtagtgccgtctccgacttctcggtcctgaagctcggcgagctccaccaaaacctaaaaagcaacacatgtgagtaataaaaagcaatggaacgagaaaaaagagaaagcgaagagcgagtggagtgtggttcaccttagcagcaggatgctccacttcaagcatcttgagaatcgtggcgccgtcgttggtgatagtgacgtcgccaatgtcgtcgacgagcatctgaaacgaatcgcatcagacattgcttacttcgtctaagatctaactatgtatagagagagaaagagaaagacagagagtgagagtaccttgtcgaggccaacggggcctaaagagcttttgacgatgttggcaacggcttggcatgccacaactgcatcacagagattgaacgatgttagaaatggttgttacgtttttcattgtgaaaaaaaaggagagagagacggtaccgttttgggtgcgaacgtcttggccggactgtctatcgccggcgatgtcaggggtttgcgcaacaaccgccattgcgaagtgtgtagtagtctagggcttcagtcgcagagggttttggttttttcaacttcgcccttcctttacttttctttatgctaagctatgctttcttttccctcctcctctttatttctttctttttcactttcaactccaagtgcattttttttaattatgaaaaattaacaataataattatattttaaaatgagtttatgtagattttatcagaaaatttataataatttacagatctcaaacaactaaattaaccctcttaatgtttatcttatttatttattcttttttaacatgtaataataatttttacattgattaaaaaataaaattgcataatatattattaatatatcttgagagtaagaaatttaatgtataatgatttttttaataaggataatgatttgataggttatgatttaaaaatatatatatttaatttttctatttatatatatatatttttttttttttttaaaccaacattctgttatatacttttggacatgattttcactcaatttctcttattttacaatattaaattcttaaattacataacaaatcaagtgacaaaaattaagtttgttttttatatattatgtaatttgtataacacggattttatacattttttgttttgtttctattttataagatattttatactataatttatgttgataaaattagttaaaaaattaaatgaaaattataaagttatcaaaaattaattgaaattgaaaaattaattggtagttgaaaaataatttattaatttataatgttagtaaaatgttgttgaagtagtaataagtataaaatgatgaagtaataaaattataatttattttaaaaagataataaaaaattgaataaatatattgaggataaaaaaattagaagttgtcatttaaaaatatatttcaatagagtttcaaaaaacgttaaagttattaaaaaaatttttgtcaaaaaattttcaactagtaaaaaaataaaagttaacttaaatgttttataaacatactatatttgtcaaaactaaatgaaaaattagttgatagttaaaagtcaaagttaaaagttgttagttggaagctgaaaatatatcttattaaatttctagtattccacaaattagatattgaatattgaaaaatgacataaacataataataaattattattttgttttaaaatgtaactaggaaattagataaaatattaaggataagaataaaaaaatataaaagttagaaactagagttaacatttaaaaaatgttattttaagtagtctttaaaaaatgaaaagttactaaaaaaatttattttccaataggcaaaaaaaattcaattaataaaaaaattaaaaactaactataatttttaccatcataaccttagtcttttttctcttttttaattctataatttttagtcttcataaattttttattccatgttaatatattttgacaattttaaattatttttataaaataataatagtagatatttgttaattatgctttactaatttcttttactaaatataacttaataattacttttaaatatatattaaatattgaatgtagtacattttaatttaaagtaaatttatattgttaatgtgatatttttttaacttgtttttacttccaaacaatattgatattaataatcagagcttaatggtatgcattgtaactttttacatcgtgaatcaaccaaaaatattgttaaaataacttttaaaataattgtatcacataaaagtcaacaaattcagaatactattatgatttatagatgaacaatagtacagtataaaatattgtgtcctatcattaagtaacttatttcctcaaataatggtctggtttagctttgggtgagccaaggctcgtggatctacatttaagttaaaagatggtgatttaacgttgatccaaaataagattagaattgaagtattttcaaaacatttcaacactcattatgtgtttggtagtgttaaaaaaataaaactaatgaaataaattaaggaaaaatatttaaattaaaataatatattagaggtgtgagactcacactaaattttgaaatataagatatttttgtaaaataaatttgtgcaattctgtttcttatcagttatatatataaaactgttttatctatgttatataactaaagtagtatgattttaaagtaggtaatatttttaattctatatattttaaaaattattatacatttatctggagttataaggtggattggatcattaaagaaggagaaaagcgagtaaagataactgagtttgatttctgcttgcaaaattaacagttctacttctaacaactaatattttttttttcgaaaaaattattatttatttttatattaaaatgtgcatgaacctaaatgaaaaatatgctcttgatccttttgttttatttcttacttcgtactattattttggtagaatgactcacaacattcttatgattatgtttaaatattgaaactaaatgttatggtaacgacaaatattcttctatagtattttttatgtttttaataacttataagtccaatgaaataaatatttttgaaaaacaaattgcgtaatattgtttgttcttagttttatattaaaaaaattgaatttagccatgttatataattgaagtagcatgattttaaaatagctaaacatgtctaactctatatatttttaagttattatttgtttatgttgtatatatttttatttttatattaaaatgtccatggagaaaaaataaaataaatgtttgataatttttttcttgtttcatattaattattataattatctgaatgtgaatcactcataaattttggtacgtacgtagaatcacccacaatattattaatttattatgattatatgatataaatgttatgttcacgagaaatattctatagtatatttttcttttgttaataacttataagtctaatgaaataaaatatttttgaaaaataaattcgtgtaatatttttcttctcattttttatatataaaaaactgaatttaactttattattatataattaaagtagcatatttcaaggtaggtaaacatttgtaattctatatattttttaagttatgtttcatatattttaatttatttatttttatattaaaacgtccatagccaaaaataaaaaataaatgtttgatgatgttttttgtttcttacttcatattaattacctaaatgtgaatcacttacaattttattttggtagaatcactcctaacattatttatgagtatatgctataaatattggaactgaatgtccacaagaaatattatgtatatataaaaaaaaattgaatttaactatgttatatatttaaagtgcataattttaaagtaggtaaacattttgtaattatatatatatatatatttaaattattatttatttatttatcttgtatatattttaatttgtttattttatattaaaacgttcatataaaaaaaatgaaaaataaatgggattcaaaggtagagttatgaaagttactttagtatttgtaagtttgtttgttttttttttttttttttttttttgcatttgtctcatagagacccatctagcctgccaactgcgaagcacaagatctttaaggatatataagtaatgcaagttatctcatacaatgatttgacatatatcactattcccctttctctggtaaagaacattatcaagatgttctaatatgtcaataccacattatcaaaatgtttaatacgtctttcttgaatttttttcctattaagattaactgcaaaaacattactggttctctttaacctcaagcacattccaaataacttagttccaaatacacacattactacaaacttttagtcccaaaccttcaaacacaacaaaccataaaataatacaatccaagctattttttatcgagtttcttgcaataaactaaagaaagacaaataaacatttatttttcacattcaacaggaattcttacacgcatgaaagaaaatatctaagaaaaatactcattagaggcagcaaagatgggttgcaatcgctgataccctcgttgtttgtccactccaactcatcccaccactcttgctgccctttaatggactttaagttgactgcattgtcactgtctagtggtaaagttttcaaattaggacagttatgtatccttaacagctccaaagaggaccaagccaatgtatgagttgagcatatagttttgaagttaggcaagttaaccagcagaagtatttctagttttggaagcacatccctttctctttcaatgttttctcctataagtacttcaatttttgaacaatcttcaagttttagattttgaagttctgaaaaatgttgaattgctccattgctgaaaatgtcactgagtgatggacaattcttcaatgacaaaatttgtaatttggaaaaggttccactgtgcaagggacctctaaaaacacatcttaaattgagcaaattttccaaatataattgctccaaatttggtaagatgactcttgtttctatttggattccattcatggtgttgctacttgtatcggctgacacaattgataaaactttgttacatcttgtaatcaaaagaccacgaatgcgttccaaacacactatgccagcaaaatttgtcaatttttttatatcttgatggcaaactaattcaaatgcatcagtttttggtagtacctcaataattgccgagtcatccttctgtccaccattgcagtacctcaaataattagtaattttatactcaaaagattcaagtatttgaggtgccttgtgttttggcatcccacaaaaatctaaatgaatttagctgcttacaactccatgatttacttcttgaaagaaattctccaagaatgattgaggagggaaaacaacatatgagatgtgctacattttccagagaagccacatgttgtaaacaattcagcatcatgcaccattgttcataggatatgacttgaatggttaattcttccaacctatgcagctttgaaatcacatgaacattttgagcttcattatcttcacttgcaatgaatgggattcgcaggcatcttagattaatcaaacatccaatttgtagaggtatgaatgttactttagtatctcgtatgtcaaggacctctagaaattgaagtgatccaatttcagatgataatgattccaagagctcgcaattgttcaagaataaactccgcagacaagtcaattttgataaagacgatggcagttgtgtaatcatgctattatacaagtctaacagaagtagactgctcatgttctcaaaaaagttcgtggtattgtagttagttttggattttttctcagcaacaatgtcaaaatcatgctgcaatcttggcttgttggaaaatcaagcagttgtctcatagagacccacctagccttctgccaagctcttgaatttgagagattttcagattctccaccatcttggaggtaaaagctacattcaggatctttagaggatatgtgtaatgcaagttgtctcatacaatgattcatgttgacatatatcattgattcccctttctctagtaaagagacattagcaagatgttctaatatgtcaataccacaattgcgtgcactttgatatgaccttttgtcatttatatcaccgagtaaaccttgtgctgcccaacactccactaaataatcagtgtaaaccttgctatttgcaggatacagtgaagtgtataaaaaacatttctgctttttttatctttgagttcatcataacagaatttcaggcatgagtacaactcttctaaaccttgattttcaagttctggccaaggtttaagatcttcaagtcccaccgaccaacttgaagcagactctttcaatttaaaagaatttgctatattgtaaatgagaagtggaagacgagagcaccttttgcatacaagtttggcgataggttgaatgtcaagggaatcaatattaggataaaggcatgaacagtatctctgaacatcttccatgcttcctcaggagataactccatgactttgatgaccctctgcaccttattcaacttataaactcgagggagtcgagtggcaattaccaccttactgccattgttgacatcactaggaattcccaactgctccaaattgatggcatcctcaacctcatccaaaatcaataaatacttcttcttttctagctctttgtgtattcttcttgcaacatcatcgctatgctccttgtcggtttctatgtccagtatcaaccgatcaacaattttctcttgaagcttatgatcatcagctgtggctttcacaaaaatgacaatttcaaacagtttagcaacctcttcattgttgttgaggttctgcattattgttgttttccccaccccttttgttccacacactccaacgactttaatcttattattttttagcaaacccagcatgttttccaaggcaccttgaagggttggatatccacttatctgtgggacatttaactcctttaagacaggctctggtggtttatcaacaagaaaatctcttaaacattcatccttcttaagttcacgaacacagttgcactcttctccatctcttcactcagatgtgaacgtcgttgaatacgccaccagggtagcattttctcttcgtatttagctttcagcttctgcacttcttctgcagcatctgataccctgtttgtccacagtttgtaagcattagtggtatctttgtggttgtttctttgaacctccctctctttatccttctttattgcaagtagcatctccatctctttgagcagaatgttgtagttgtcatcaaggtttctggaagacgcaattttagatgcaattgtagtatgtaattctccaaccccatgcgctcctacctctccaacaagaggggcacaacctcaagcccagacattatgaaacttcaaagcctacaatacgttaacaaagaaaataaaataaaggttatattcatataatacaccaaatcaacgtatagaaattctagacatcagcggtatagaattttgaagcatacacaaacataggcgctttattcaatatgatatgtatgtaacacccaaagccaaaacttcagtatgtaaaaactaatgattcaacctttagtaacacacttgatcattatttatcttttctgtttgacagtaaaaacattttaaatatagacaattacaataaatcttaaattctaaagcaatcattaagaaacacaaaaaaaaaaaaattatatatatatttatatagtatatataaaccttgagactagaagtagcaccatttaaaagtagtaacttattgaaactcggacggatccaggaatgcatagggacggggggggggggggggacgatttttttttcttacacaattatttaattatttaattctaataaataatatgtaataaataaaaaagtttcacaaatatttattattaattttatgcgtaaaaagaataaatatacttctagaaaataaacaaacattaactcaatactcgatttttttattcattttttattaaaatattttctttttcttgtttctcaatccgtccctattgaaactgatatacaaaatgattggaatgtatgtgagggggaatcaggagcaagagttaagtaagaaagattcatgtgtacctctgctgctaactgttaagaattgagatccatctcaagggtgagtgaggaatcagaagaacagctaagaaagattcatgcatatctacctctgccagcagctcttgtgcacagatttgcaaaatgatgggtaagtcaacgcatgagcagctccaaattgagtctctggtgtccttgttcaatactagtggaggacaggcaccaaccaaataaatactactgattaagatacatttgattattctaggtctgtttaatctataacatctacatttttaaaaaatatacttttgactacaaaattaaaaagaatatttataaatatattcttcatatcattttacatttattattagttaattcaataaatacttttatctaacgtttctaattaaatgatctactttaacaactttgatttcaaataatttgtcatctttaagccatttttttttaccaaatataatatatctgtttgataagtcatttcaaataattaagaacttatttaatttataagtttgttctaccttaatgactttcaagttttagtttaaaaaatcacttttaagcattgcgttaacttagaatttttttgtcagatatagtttcaaagctattgaatatgaaatatttagtaaaattatctaataaactaattattccatatatatgttatcagcgtgtgtataattaaaatgtaatagatttagatagatatggattatttagtattattaggtataccatattttataaaaaaattaaaagagaaaaaattaaatatacaaatataatttgttgaaaatacgagttttattaattaggaaggagtaaaataaaatcatttttggaaattagcagacaaaataaaaagacaacaatcataaaacttttgtgttataagttatatatttggaaattattgtattttagagaaagatgaaaacaaaaatagaagacaataaattaattattccttaattagttgaaagtgatatacagaatcaaactacttaagacttaagaggttagaattgagatccattcaaggtgagtgaggaatcaaaacaatagttaagaaagatttatgatatgactgtgtacctctgcgagtgcgagcagccgtagccgacagatttcttcacccattttgcaaaatgatcgatcaagtgtttgattatcgcttgctctgttttttcacaatggattcaagtcaacgcgtttatcacttggtgtgtggtgtcggctcgataccatccttataatactaatataggaaaaaaagtaaagataaatgctattgcctattgatgattttttaaaggcaaatagtattgattatattaaattaaaaatatgtatacaattacttttacattttaattcaatataatttttatcatattattatacaaatatctattaattttttataactaatcttcataaaaaaaaatctatctaatcacatctttacaagattcaaaatgaatattttgtttactagtcaaactaaagagacttatcaaatacatttgattatatacgtgaaatatatgattaaaataaatatatttaaaaaagatgaatttattttattatttaatgtgttaaataaaattgatctttttttatactgtgtttaaatataattttatttttcaataaattgatctgtataaaaatacatctttttatattttaatttatcatcagttaataacgaattttaccaagggtctattgccattatcaactgaaaaagtaacttttttttttttttaatgaaaggggctaaaaccccaaggaaaaaacactaaagccactaggaaagatcatggaaatagcatatgctaaaatataacatgtgaccctccgtagtattgacataatttcattaatttgctagcaaatccacaacttgattggcctcgtgtaaggtatgagaaccggaccaactgaaaagctaacaataaatgaaaattaagcagagttgaatatagtgtttgacaagtaattacaagtaactagttatattcctcatgaaaattcctttcatctaaaacatagagtaacagaatcacagagagtcagagacagtattgattcttacgatattcttttagtaatttttttttataaaaaaagaccaagacacgtaatgatattgcaaaacgattattatctaaagaatatttgtttctattttgctaaatcaaacattaagtgaaaacgaagatgtttacagccaaggctaaggcatataaataactctgtttaacaattagcaatagcatgtactcgaatataaacataatccaaaagaaatttactactaagattgtaatatatgaaccagaaagttgtaattgcatccttcctttcctaacccatgcgatatttaattaattctgatctaatattgttaacatcctctgcctcatggagtagggcttcaagctctgcgacctttcttttattttttgatgaggtctctgcttcggttttctattgataagacagcagtcatgccattttttgaaacaagacacgacagaaaaattttaagatggaacattcacatgaaatatgaaaaacaaaacaaaataaacgcacacaaagtgaagcataatttaatatgtatgcatctaactagcaagtaaataacttattctgttagaactgggagaaagtgacaagattcaagaaagaaatcaagaacagaaatatctaattagtaatatcctcaccggaaacataacacaaatactagaagagacgagtacgtttagtgataatggaatggcatgtacgttcctattaccttgtgtcgcaaatttatatctatgttgtttcttttttctttttatgccttatctgatttgatttgtttcgcatgcatgtgttatatactttgattatttagttatatttatattgaattgaatcgaattgtatttttattttatatttgtttcaaataattttttatctaaaaattgaatcaaacttcactgcaaacactcctatccggctctttgcatgatgcagaccccaacgacaacattgcttatagagttatagtttcgttactaacttggtatatcctttggtaactagtttttttatctttgcatcaacggagcttttaatgttgagtgaggattataaaagttattatatttaatttatatcttttgaaaatgattttttataaatgaatatattcgatagagttttaacaaaaatctttagaattattcatatttctataaacatttaactatttaattcactgtctttaatagagcaaattttgtttcttttttttagttaaaaattataatttcttaattaaattatttttatcacatataaaaatatgacttttgttatcttttagcacaataagacaatacaattttaactaattatataaaaaatattattttatatcatataagaaataatagtattagttttttttaaatcatgttttacaatttattttaagtaatctgtattttacaacaaaatttagtctaaaaataaattcaaatttgctaggcccggtccgattttgaaaaagaaaaaaaaggaatgacaaataaaacaaatgtaaaataaaggaataagaaaatgggattaaaaaatccaaacccatgcaacgtgaaagaaaaaagaaaaaagtgtctttacctttcaacatacaattttaaccctagtaaacttgactatttttatggaccgtttgcaaggagagaaattttttaatttttcaaaaaccataggataagaaacttgattttccatatttgatatacattttagaaaaataacctcgaaaaatgatatttcttgaaaatgttttttaatcaattttttatgaaattttttaatgatagagctgaaaatcttacttttttcaagtttaatttttgtctgttataaaaaaataccatattattttttattaaattataatgtaataataattaaaattattaataaaaatatgtataactttttaatttctaaaaatcttatataaaaattattaatgttgaatcaaataaattttatttattaccaaacagattcctaagaatcataatatccggaacctcaaataaccccgtaactaagaatgatgaatgtttcatcattccaactccagcatttcatttcatccacgttttgtttacggaacagcttgtgaatatcttcattttcattgatgtccatctcttgtcggacacctcctaaaccaactatttttctcctccatcgtagcacaatcttgtccaagattcgaactgccagtgcccatatagattgtaatggcccctcacatgagcctgcccaaataaattagaaataactaaggttgaatatcaaagcatgcaggtgcatgcgtagtgttctgatgtttgtgaatagctagaaaagatgctggtaatttaagttggatcaagctctttcttaaggtatttatatagaagaaatatcttcagaagtcgatcattatgtacaaagtgatatttaatcagtgaggtgaagtgtgtgaacagtgtcaataaaataaaagagaacgagaatatgtatattttttcctctgcaagtatcccttgtttataatgtacttaattcatggttagttgtggatttcacttaaggtcaacagtccactattcttcattgtaccttatcactaaacacttttaaaattcgtaacagataacttgtctataatcaactgtttttttgtttataaaaaaatcaaatctctctatatattcactttcagggtatctttaagtgctagctatatataaattaagaataatatctttttttttatcagccaaaatgataatatattaagaataatatccatgtagcagtagctcttggaatttattttgttctagtcaaactatgaagttaacatctgttacctgttccttggctactttttgattttggcgcaatgcaaagaaatctttgcgacctccatatatcttccgaatcaataaagcgactggcacgaggctagtgtcttgcgcgacgaatagcggataactattactcgtatttgcccgctctgttatcattgcaaatttacataattgggtaattttttaaaaatagatagtttttgaaaatattgtataatattaataattcgtgtttaaaataaaattttctaaaaattgtattttaatacacaactttaaaattataatttatttaaaaaatactaatgtcatgattcaaatacgacttcaatattttatatttttctaaaaaaaaatagtaaaattgtattttaaattactacttttaatattttattttttaaaaatattaaaatgatatctaaaataaaactttagtatttttttaaaaaattataccgttctaaaatatgttttaaaatatgactttttttataggaaattgtgttttaaaatagacttatcatatgtataatattttcaaaatctattaattttgtaatttttttaaaattaccccatgtaaatttgttgctatcatccctactcattaattagacttcgtatcaaatggaaataaacttttccaatctcctaatttgaaaataaataatgggcaaatatgaaatatgagtttcccaaaaataaaatatatgcaatataattatcttgttacctcctaacaaatgtggcgatattttttgcaaactcatattcccataaataaataaattgtgaaataagtattccctaatttgataatcttataagtttttattccttgtactttttgagacttgatttggttttttaaattttattttgtttatgattttaattatttttatttattttagatattaagtgatgatatgatatttattttattattattttaatttatattaaatatatttttatatttgaattttttttagtcctacaaattatatttgttttgttttttttatctttgaaattttagataatatttttatggttcaaaatattatttaaaatactttaaaaactaaaaataaaacaaacataaatgattaaaaaaacaattgtacaagaataaaaagataaaaaaggataaattataagtaaaagaatggattcaaatttttagttattacgttttctgacggccaaaaacgaacagaaattgaacgaccgaaaattttaaattatttcttttttccactttggccagagtcattttctctgctcctatcccctccgacagcggcctcttcacgcacaccgagttgagttaatgaagagaaagcggaagcggtggggatggctttgaagagagatgttcaatgccagggtcatcctcttcggtgacgtcgacgtcggcgaccaaacctccagatctggtttcactacattcaattccctaatcacgtcattgtcctctgcggtggcaactgaaagtccccaaaaactgatcgagatgctgggaaaaacgaggaaagtttcggtgcgtggcaaatctgtgacagctaactacgcctttgcttcttacacgcatcaccaccaccaggggctaccctcccttgaacaagtttcagaagaagttcaccgagctcctgaggtgaacaaggaagacaacttttttttttgtgacgaaaaaaaaaaagttacagctgtcaagttttctggaacaagcaaatttcacataggtttggattgcaggccaaaaagtcacaatataaatttacgaggacgaataacagataaaattttataaagattaaaaatgaactttgagcattttgtatagacaaaaaacatattttaagtcaattaataatttctggtttttataattttatattaatttatcatgaatacttttgatccccccacccctctcttcaaacatccaaaaatcatttttttcactacattttgatggtaaaatcatttaacccaatttcccccacttttttgccttgtaatggaggtattttttgtcttgttatgtaggcaacctttgatgatgacgatgattcaacaagagattacatgcattgtaacaatctttaattaacattcattggatactagcttgatgttttgtatgttccaagtttagtggattaccagtaacattttttggatgaaatgtatttataacttgaagattgatcactagtctttttgttcaaacttgcctcatccccgctcttaatgatcaaattctgttctttggtgcatgtatgtcttccttggtacgttatctcaattattgctgggttttcgtctaacctttgaacttgtttttttgctaggcacccttgtacagatccatatgcgcatttgtaatatcctctgcaatgcaaacgactagttttgtcaatttttcggcaaaactagaaaataacttctttttatgttcttaatataaagattaggctggcaacttagtatggtacgaacatcaaataaaaatattaatagaaacccctcttgttttaagccttgataaggaagttggagaagaaacctacattctctttttagttgctgtgaatgttatagtatagttatgtccaaaaaaaagaatgagatgttatctggagtttgtggttgttctcggttttaaattttcgtaaaggtagttgtcaaatgaacaagtttttgtcgagaatgtcaataacaagtttccaacagaaagcactaatttgggcccatttgaaaccagctgacatggtcctttagttaatttttcaaattgcaagtcattttgaaaacactgggggcatagaaccattaaaacaaggaaagagaactcattgtacatgcatattttattttccccattacgctcattagctaattggctactgattttccagttaccaggcctaaggcctctggtattaactaaacgagaggggtgaaacttgtacgtcaataacctagagggggtgaacctttctgtcacattctaatcaaatgcaattatataaacttatactacgaaaaaaattgctaattaaacttgtttaatttataacaataaaaagttaaatgagaatagaggttttaactaaccttgaaaacttagctccaagaatctcttttgcccatattttatccaattatatccatcatctaaacacccttcacattaacgcttaaaatatctttaatattagatcttggagatagattaagatctaacatttccaaattcagcaataaaaaactatcaaaaaatataaaatctcaaaatcgagaaatggagatcaagcttggagatagatcttaagctgaagatctaacatttcccaaattcagcaataaaaaactatcaaaaaaatataacatcttcaaaatcgagaacatggagatcttgatctccatgttgaaaatccagttcttcaggaaaaaatgtgtatatctgcacagattccaaataaaaaattattcatcaacaacattaacaataaaacgcagaggtaacagattcgttggaatgaagtaaaaacacaacaaatataaatgaagaagaagaaaaacaaacaacgcattggaaaaaaaaacatatcaggtgaagggggctcgcgtgtgtggaggaaaagggaggtgggggttgcgcacgcggaggagaaggagaaggtggagccgcaacaaagaaggaagaagaggaagaagaaaaagtggaataacagaggagagagggaggaggaaaaaagaagaaaagatagttttggaagttgaagaagtgaaaagaggagagagggaggagagaaaaaagtgaatagtgaaggaaaaaatggaaaaaaaaactaaaaatatatttaaatatttaaaagtgaaattcacgtgcaatccattagaagttatataagatttcaaaaaatatctcttaagatattttttaatatacaataaaagtagactaaggtattctgtagaacttgaaattcctattgaatattaaatgaaataatttctttgtgtaccgtgtttagcatctaaatgttttaagtttttaattaatgagtttttcagcacttattatatcttttcagcaaacacattcgacgtataatttacaggtttatcaaacatgctctaatgtaagtaaaactgtgatataagaaaacaaaagcaatcaatcacgaacgtgaaagcatctcaacctgtctattactttttgatgcatttgtaatatttttggctagtaacgactttcgctttggcttcatgtttcactgtttgaactactaccacagatgaactgggctaaaggtgacaacagtatttcaaagatgatcatgtgtagaacttgaaattccctgaaaggaaaacattcaagtaatacatacgaaaaatgaagctaagagggtatgatcatatagcaaaagcaattcatacagagatacaaaattatataattataacactagctcatatgacccatggttggagtttgatgagtagggagataaatatgaacagacttgtttatttaaatctccaaaattaagtatgatcataaagtgcaggaaaaaaaattgccacaatttttaaagcaccaagaagaattgttgtgaagttaattttgttttgacataaaaagatgtcattaagaaagagatatacaaaaataggaagatatcctacacatgaaaacttatcatagttattaatctcacatagaagtacatagctttaaacactatagcaggaagcacgatggtcattttttaaatattataatgcaagctaaatagtttatactacatatatattaaaaataagaaagaaaaaaatccaaaattaaagaaattcatgataaatattatttttttaaaataatataatatattttaaaataataatatataatgcaagcacgatggtcattttttttaaatattatattttgggtggttcggctctggattgggctccggattcgattcccggctagggttcaacatcaacaatatattttaaatattatttttattttagtaatgcaaatttgcaagacaagtttttttattcaaacttgcctcatcccaatctcaatgatcaaattctgttctttggtgcatgtatgtcttcctcggtaggttatctcaaatgttgttgggtcgtctaacctttgaacttgttttgttgctcggcaccttgtcattctatatgtgcatttgtaatattctctgcaatgcaaaccactagttgtcaatttttcggcaaaactagaaaacaacttttttatgttcttaatataaacattagactggcaaagttagtatggtacgaacatcaaataaaaatattaatagaaatccctcttgttttaagccttgataaggaagttggagaagaaacctacattctcttttagttgctgtgaatgttatactatagtctatgtccaaaaataaagaatgagatgttatctggagtttgtggttgttctcggttttaaattttgtaaaggtagttgtcaaatgaacaagtttttgtcgagaatgtcaataacaagtttccaacagaagcactaatttgggcccatttgaaaccagctgacatggtcctttagataatttttcaaattgcaggtcattttgaaaaactgggggcatagaaccattaaaacaaggaaagagaactcattatacatgcatattttattttccccattcattagctaattggttactgattttccagttaccaggcctaaggcctctggtattaactaaacgagaggggtgaaccttgtatgtcaataacctagaggggtgaacctttctgtcccattcaaatcaaatgccatttatatgaacttatactacgaaaaaatttgctaattaaacttgattaatttataacaagaaaaagttaaatgaaaaatagcttttaactaaccttggaaacttagctccaaggatatcttttgcccatattttctccagctacgtccatcatcaaaacaaccttccgcattgacacttatcttttctctccaaacttcagtttgaactgttcttagtttacgaacctgttaattgccatgccaaaatataaaaaccacaatagtcttttattcaacatgttaggttcgtgaaatttatttttgtttaactaaagactatagagacaccgcctacggacacatcttcacattggaactcagcaacagtatttgatctcgattcatgaataaaaccatcatcatcatttttcagttggggaagtagcttacattgtgttgaagctaaagatcgatttgcaatatagagaatatctaccttctgaatcttttgtggtataattgatgcatagtaaaattagagaacaaacaatttcaagttgcaggcgtataactccctacttatatgaccatgcatcatagcttcattggaatgagacatttccaaagtgatgttttccttttcttttctttttttcgtgacagcaatgaataacttaagttgctgataaagagtaagcaaattccactaaaaatggagagaatccgtctgttagcactttcagacccctctaagattcacttctaactagggctgtggcaaccaaaaggccatggccagttaagtagttacgtttagccttaaaaaatttatactttttgaaaaatatttattattaatttgaattattaggtgataaattttataatgacatatattactatttttattattaagactgtaattttaagattgtattaattgaacaattgaaaactttagatgaagatatggattgaaaatacttttaagttctactaagaattataatattgaaaatcttgatttatttattgcaacaaggatagacaaaaaaaattcatatttcactaaaaacattatttatttaaaaaattgtatttttctttcaaatacatgcattgtttctaatattattaataatacttgtaaatattattattattattaaaagtagttttttaaactaaaaatactcaaatcttttttaacatactaaaaatcttatttgatatactaaaatcttatttgatattgaaataatttgaatgattttgtcattttatatattgacaataaaatgctagaaatactttacactttctataaaactttgatcaataatttcgtaattgataaaaaaataaaataaagtatgacaaatattaaagaaaaatacagaagagtaagcaaattataatattgaaaatcttgatttatttttaaaataaagatattgcaagaagtatagaaaaagaaattcatatttcactaaaaatattgtatttttctttcaaatacatgcattatttctaatattattaataaactagtaattcttattattattgaaagtagtttttaaaactaaaattactcaaatctttttatgttacatactaaaatcttatttgatattaactatgttacgaaataatttgaatgactttgtcattttatatattgacaataaaatgctagaaatactttatacttacttataaaactttgatcaatgatttcgtaattgataaaaaataaataaaaatttgacaaatattaaattaaatgttaaagaaaattatagaagagagcacaaaacagagagatgaaggatctgtattagagagatgaacaatccaaggacagaacagtaaacagagcacggcagcaaaggtcgcggttggccagaaacagtgacaggttcgccagaaaatggccataaaggtcaggaatgaccggaaactatggagaatagaggctgcagaggttggggatggcaaaaaactcacagaaggcccgaaaatgcagggaaatgccaaaaatgttgccagaaaaggtgtgtattggtgggaaaaggataacaatgtcataacagtgtgtacaagtgattgagaaagcagagtttcagttgtgattcaaagaagggggcaaaatcattgcccactaaaacaccctaaatttaatggttaaattaaaataggtttttttgtgatccactccaataaagcctgctccaggagcaatttcagctattttgctagatatggcagctgtgatggtcgctacttcaaactgatacacttttcaattttcatagcatgctctagccgctctgcaatgcaattctgcgctagcaccactatttgttgctattggcaactagtcatatgaaaactgaaaataattctttacgtgaaatatgttgaatacattcagcacattgctgatactgaatgaataaagcagcaactacatcctatctgaataattaaatgacaataatttcctttggtgtcaccgtgtttagcatctaaatgttttaagttttcttaattaaatgagtttttcagcacttaaaattataatcttttcaagcaaaacacattcgacgtataattttacaggtttatcaaacatgcctctaatgtaagtaaaccaactcgtgcatataagaaaaccaaaagcaatcaatcacgaacggtgacaaggcatctcaaacctgctctattaccttttttgatgcatcttgtaatatttttggctcagtaacgactttccgcttttgggcttcactgtttgaactacccctacccacagatgaaactggggctaaaggtgacaaaacaggtatttccaaagatgactttgctatcgactgtgtagaacttgaaattccctgaaaggaaaacattcaagtaatacagtacgaaaaatgaagctaagagggtatgatcatattagcaaaagcaattcatatagagatacaaaattattataattataacactagctcagtatgacccatggttggagtttgatgagtagggagataaatatgaacagacttgtttatttaaatctccaaacataattaagtatgatcataaagtgcaggaaaaaagatttgtcacaatttttaaagcaccaagaagaattgttgtgaagttaattttgttttgacataaaaatatgttcattaagaaaaagatatacaaaaataggaagatatcctacacatgaaaactaatcatagttattaatctcacatagaagtacatagcttaaaacactatagcaggaagcaggatggtcattttttaaaatattataatgcaagctaaatagtttatactacatatatattaaaatcaagaaagaaaaaatccaaaattaaagaaattcatgataaatagtcacattttatgcacagagtcactatcaatctgagaacaaaaaaagcatagtaatagtaatgaagtaaaagaaatgaaggatgatagtaaaattaatagaaaaagaacataacgagttatatttttcaaaaatgcattaatgtattattttaggtatgttgctaacttttgttttttcctttccctatctatttatctttcaaaaacactgttcagattgaccttgcttttggggcctccaagatcaggaaaaactacactgctgcaagcacttgctgggaaactggacagggatttaagggttggccatcctcttgctccatttttaaggaacgatgcaatgatatcttcctacatatattttttcattaaatgataattttgcatgatttaggacttgcttttaactaaccaaaaaaaacccttcaatatttctccacatttggtgtgtcagtcagtgtcagtacgtataaaatagtgatacttcacgtgttaagtgaatttaaaaaacttatcatcatgtcagacagcatatatttccaatcatatctgtcatatgctaatgctttgaagtgctcactcgctgcttttgagttcaactcattccaatcatgatcatgttaggaatatggtgaattggagtgttcattcttctatctttttctcagttgcgcattatttctagtatggtgaatatgattcattttccattattgtgattatagattgtacttctcacctaaggatcatagacaaggaagttcagtaaaatgaacaacataaaactggtaattcttattattattgaaagtagtttttaaaactaaaattactcaaatcttttttatgttacatactaaaatcttatttgatattaactatgttacgaaataatttgaatgactttgtcattttatatattgacaataaaatgctagaaatactttatactttcttataaaactttgatcaatgatttcgtaattgataaaaataaaaataaaaatttgacaaatattaaattaaatgttaaagtaaattatagaagagagcacaaaacagagagatgaaggatctgtattagagagatgaacaatccaaggacagaacagtgaacagagcacggcagcaaaggtcgcggttggccagaaacagtgacaggttctccagaaaatggccataaaggtcaggaaagaccggaaactatggagaatagaggctgcagaggttggggatggcaaaaaactcacagaaggcccgaaaatgcagggaaatgccaaaaatgttgccagaaaagagtgtgtattggtgggaaaaggataacaatgtcatcacagtgtgtgcaagtgattgagaaagcagagtttcagttgtgattcaaagaagagggcaaaatcattgcccactaaaacaccctaaataaagttgtttaatggttaaattaaaataggtttttttgtgacccactccaataaagcctgctccaggagcaatttcagcaattttgctagatacggcagctgtgatggtcgctacttcaaactgatacacttttcaattttcatagcatgctctagccgctctgcaatgcaattctgcgctagcaccactatttgttgctattggcaactagtcatatgaaaactgaaaataattctttacgtgaaatatgttgaatacattcagcacattgctgatactgaatgaataaagcagcaactacatcctatctgaataattaaatgacaataatttcctttggtgtcaccgtgtttagcatctaaatgttttaagttttcttaattaaatgagtttttcagcaattaaaattataatcttttcaagcaaaacacattcgacgtataattttacaggtttatcaaacatgcctctaatgtaagtaaaccaactcgtgcatataagaaaaccaaaagcaatcaatcacgaaaggtgacaaggcatctcaaacctgctttattaccttttttgatgcatcttgtaatatttttggttcagtaacgactttccgcttttgggcttcactgtttgaactaaacctacccacagatgaaactggggctaaaggtgacaaaacaggtatttccaaagatgactttgctatcgaatgtgtagaacttgaaattccctgaaaggaaaacattcaagtaatacagtacgaaaaatgaagctaagagggtatgatcatattagcaaaagcaattcatacagagatacaaaattattataattataacactagctcagtatgacccatggttggagtttgatgagtagggagataaatatgaatagacttgtttatttaaatctccaaacataattaagtatgatcataaagtgcaggaaaaaaaatttgccacaatttttaaagcaccaagaagaattgttgtgaagttaattttgtttgacataaaaatatgttcattaagaaagagatatacaaaaataggaagatatcctacacatgaaaactaatcatagttattaatctcacatagaagtacatagcttaaaacactatagcaggaagcaggatgggcattttttaaaatattataatgcaagctaaatagtttatactacatatatattaaaatcaagaaagaaaaaaaatccaaaattaaagaaattcatgataaatagtcacattttatgctcagagtcactatcaatctgagaacaaaaaaagcatagtaatagtaatgaagtaaaagaaatgaaagatgatagtgaaattaatagaaaaagaacataacgagttatacaaaaattagcaaaaatttgaaaataccaacatgccaataacaccatgaaatttgaaaagaggataactaaaaattacctgatacgtcgtattgtgatattcatttagttgagtctcttgaagtgcagctagctggttcatcatgtcagcctcctcgttaattggtgaaaaaattcgctcaaaataattgggtcgaccagcatctccccactctgctacattccatttcaattcttcccaccagatgctttctcctttgatgatcttcaaagatttgcttgacaactctgatttggaaagactttggagttttgggcaataataaaatatcatttcttctataaaaggtccaacatgcatgccattaaaaatgttgaccaattcaggaagatagagaagcgatatcattctcaacttggggaggaaaaacactggatattgttctggtgtggcatgacttatcagggtggttacttttggacagtcttcaacaataatctcctccagaaaggaaaggtttttaacagaatctaaggtgaatatggtagttaacatggggcaagtgtgtaatgctatagactttaagcagagaaagaagggactactcccttcgcagacgcttcttaaattcttcatatagaatacactcaaaaacttcaacattagagaagctggcctatcaggtgaattgcttccactgacaattgtttccatttcattacactctgccaatatgcatacttccaactcccataaattcctcaaatcgaaatcagagagactcttgatggtcatatgtcggtctaggtacaaggctttggagcgcccaagatgcattttcactccatttggaacattcacaccattaacaaactttatgctatagtcacagtgtttaaattttgtctccagttcaggtggtacacgcgatatcaaacgtcgcatatgttgaccaacaaccaatctgaaactgagagatttttgggctggtatgactttcaagaagtcagcctctgggacatatatactcaacctctgcaaattacataatccataacaaatttccgccaagacactaataacattcacattccatcgctcatcttcagggtcaacgttgatgcttaaatacttcaattgagtaagatttgatatcaatcctggaggaataattgttgacttggaagttccatcaaagcagaggcttaagctttgaaggttgatcaattctcggatctctattggcagatgggtgatcaaagtcccatcaagatcaagctctttgagattctttagctgtccaatctgatgtggtagttccatgaagagatcacagcctctaagataaaatttctgaagttgtattaatttagagacagaagggggtaaatcccttatactagtgtaggataagtccaagtgttgaagtaggggcatgtggttgaaaaatgagtcagggatatccatcaaatcaacattgccctgcaacaacaacactttgagtttagggcaatctggtgattgtggtaattcacatattttattgtccatcaattctatctgaataagactatgccatcgtccaatgtagggtggctctgtcaatcctaatgcaccatgccttaggatggaaggctttgaggtgtgcaatgattgtattatatcataggtttctactggcaaatagacatctccactttcatatttcaacaagacaaaacggtcttgaagctcattgatgtaatgttgtaattgccttctgtattcaccaagttcttgtgtgtatcctaatattgtcttagcccaatcagacaccaagatatcatctctcacgccatttttaatgttgtgaacaggcaaactgagttcaaggcaaagcttttgtgcatcaccaatgtcttcccaaataatatttacgaatgcattgaccatgactctactaatgccaattcgatcactatcttgataatcataggaaggattcagactgcttaatttgtcaagtgcaagttcccactgtttaaaatcttgcacatacgtaagatactttgccacaaggacaatggcaagaagatgaccgtggcattccttaactatttccactgcaattttctgaatggccattgatgaacgtaccatgctactgctgatacaactgccacatagctgcagaagactttccaaggcaatagatgatcctgggtccaaatattcaaatccattgtgcatgcaattctaaagtcaacatccttctctgcttgtgttgacggctcagttgttatcaacaccacaattccagttggaaaacgcaacttttggaggtccagcttgttgttgctatctgcatccactacaattaccaactgcccattgcttcccatgtcatcaacttccatcatcatattgacatcgatttcttcctgaactcgaacctctgcatcagtctcatatgttgaggcattgatccatagggctctaagaaaatctttgtcaattccaaacatggtgtgcttatcttcaacggctgaagctattgtgtccactacagatcctttttcagccaagtttctggttaacagtctgatatagcgtgcacagtaatccccagaaaacaaagtttgaagtagttggttaactgcgagatcaacagattgttggagaatggcttctggtattgcatcaacatcattatggctgatgatggatctctcaccactttctactttacttattatttccattggcataaatcccttcatagatcccagtgccttctcagttagtacacaccatggtttgtccatcacagtatcatcaccagtggacaataactgagctttccattcaggaaatgcactaatccaagatcttaaaatatattcatcttctaatttcacgggataagtcaacacgaggctgataaaatctcttatcctcatcaaatctgacagctcatcattgtataaaacttcatctttatctgaagatgttccctctgcttcattttgaagagttgaaaatttaggacccaatagagttattatatattgaacaaattcttcaatctctgtatattgtggcctgaaattttaaagaaaatgaagaatgcgaaatcatcacccaagagaagcaaaacaggagaagataatagaagagtagttttcaacgtttaaataccatttgcatcaaacgtcaaacatttataataaatttggacccaatttgcaagttacatctttcatgagatgagagcgggttacttacttaattgggatataccaaccagagagattggccactcgagtcagagcttttctccatgtcagcatttcctcaatcctctctttatctaccaagaatctttcttcgtgtttcgaaaaggctttctcgtaccatccagtctgttttcgcacatctgatggatcaacatcataaaaaataggcagaagacgtcttggcgaagtttcaatgcaattgaagatgtgtgctagttcacgcaaacaccaagttgaggaagcatagttctttgaaaggaccacaatgaaaaggcgggagccttgaattgcatgtaacagctcgggttcacccttttcgagaagtgtatgacctttgaaggcgacgatgccttttcttctgagagcttgaaaaagaaaacctgtgaagttggtgtagttgttgcgtgtgtcatcaccgtggaagctgagaaacacgtcatacgcagaagagctgctctggacgctggagatagaagccattggaattgcgaaagtggaagtaaacttgtttgtgaaaaaggacaagtatttctcgattgctggagttggggagcgcacggaatgcggtagttgtaaaatgggatccaatggaagaaaagctgtggcctgtggcgggaattattttaatcaattactctcaatttgatttattttaaatttttaatcttatttttgaaattttaatttcgcttagttatataattcatcttttaattatagttaataattcaactgaatccattaattattaaaaaattcaatcaaataatttattaataagaaattattaatccgaatgataccgaaattaatttctttaaaaaagattatacataaaaaatattttacataattatattcatattcaatatatatattttttattttagtcgtaaaaataatatgattataacatttttattaattagataatttaatttaacttttaataataattaaatgatcaattatataacgaaagccttctaatttttacatatgatcaacatcatcaatatcaatacaactaaagaaagcaaatctctttctaacatacttatcattacttaagaaaagaattctggcacaatatttctttctttttcttttcttttgacttaccacagctcacccactcacccccaaaatatagatcttacaataatatattcccagtgtgaagcgtctgcatacaggctagcggaaaaatcatgctacagcatattacagcgcgttctagtagcttttattactctaacttcagtatgtaaaaacttatgattcaaccctttagtaacacacttgatcattatttatgcacctcggattagttctcttttctgtttgacaataaaaacaattcaaatatagacaattacaataaaatcttaaattctaaagcaatcattaagaaacacaaaaaaaaaaaaatatatatatatatatacacatatatatatagtatatataaaccttgagactagaagtagcaccatttaaaagtagtaacttattgaaactcggacggatccaggaatgcatagcgatttttttttttacacaattatttaattatttatttcaaataaataataatttaataaataaaaaagtttcacaaaaatatttattattaattttatgtgtaaaaagatcaaatctactactaaaattaaacaaacattaactcaatactctatttttttattcattttttattaacaatattttctttttcttgtttctgaatccgtccctattgaaactgatatacaaaatgattggaatgtatgtgagggggaatcaggagcaagagttaagtaagaaagattcatgtgtacctctgctgctaactgttaagaattgagatccatctcaagtggtgagtgaggaatcagaagcaacagctaagaaagatttatgataatgactttgtacctctgcgagtgcgagcagccgtagccgacagatcttcttcaccctgattttgcaaaatgatcgatcaagtgtttgattattgcttgctctgtttgtttcacaatggactcaagtcaacgcttttatcacttgaatgtgtggtttcgtctcgataccaatataggacaaaaggtaaatataatgctattgattatttttttaaggctaatagtattgattatgattaaattaaaaaatatatgtacaattacttttacttttcaatcaaatatgattttttatcatcttattaatataaaatatctattaattttgttgataactaatctatatatatcttatttataacttagatcaaggagacttaatcaaatatgtttcattatatatatgaaatatatgattaacataaatatatttaaaaatctgaatttattttattatttaatgtgtttaaataaaattgatcttttgtttataatgtgtttaaataaaagttataattttatttttcactaaattgatctgtatacaaatacatctttttatattttgatttatcagtcaattaataacgaatttcaccaaggatctattgtcattatcaattatcaactgaaaaggctaactttttttttatatgtgtttgcttaatattttaaaaaaatattaacaatttgcttaatatttatctcttaaaatttaataattgtttctttaagttcattttatttttttgtatttgactccttctatccttcaaaaaatttgtttttgtaatgagagaaagacagaagaaaagaaaacttaaaatttgaatatgaagaaaagtcaaaagaaatttgattttttgttgtttaaaaattaactccccccccccccacaccttctttctattttttctcgttaattatctatattttgctatcttttttttttcattcaaaccaaatattaatcttatacatcataggtattttcttttctttctatctcttcgttcttatttgatcacctccttataataataaatattatttgttttatgatcacattgattacaaacttgagtacatgagattatatattgtatgcattatactactataatttataggctttctacatcggttatacaacacattcaaagacggagtgtgagagagaagaggaagttatagggtctagcgaagcaggaaaaggggtgtacaatatacatatttttacgatttctttcaaacccttttcttttttctatttttctatttcggattcgaaccattttgttgtaaatgaaagaggtggatttttgtatatattgattgatatcgatatcgatatgcactttcgtgagatcgacacagattacgagtaatctatttgcattgacaaatcgattgaaaatggaatccatgaaaaaaaaatatttttttgtttatttaaatattttccctatattttctatttatagatcttgatatgatcgagcaggacgaatattgtggtttcaagggttaatgtgagagcgaagccacatccagcaatgtgagaaaaccctaatggaggaagaagagaagaagaagaaggacgtgagtggtgagaatatggaatcgcgcccgtggagttgggaataagaagagaatgttcaagaatcacgagaaggaggaacaactgattcaaagacgatttcgtaaaagcaactttgtattctcttaatctacattggtttttaaataaaccaatgtcgtaatgagttttcaaagacgatttttattgacctatctttaaaaatttgcaattacttacaaaaatgccaccacgtcttctacgacatcaggttttgtgaaaccgtcgtaaaactgatgtcgtagaagactgcttttgtagtagtgttattttgacaccttctttttggtatgatggccatagtggatttatccttatttagccttctttcctatcttcgattatccttctaaactcgttcacacctcatcatgctttctttcattaattctcaagcttgatctcactctcactctcatattacatgatttgatgagttagaaaacatgcacgcccgcatgcaaattgtttgacaagaagaagaggcaggacaaacattaaatcccaaatactcacactggtctcataattctctctcaagaaagaaagaaagaaaatggttgtaaaatcaagaaacaaagatggtacattttgagatttgagagataattgtgaacttaagtgagcctctgagaccaattgagataactgtttgggctgtttcttcttcttaccaaacaatttgaaatttgaagaatgaatatataagagaaagaaaaaagaaggccagggagaaatacaggaagggaagttttaatttgtcaatgttcaagatgatagaaggaaaaaggttagaaaatttcctccaaatttacacgtttatttcaataaattcttttatttcatagtttagaatagaagttaagagatctcttcttaagaggaaaacttttttaatttaattttgattttgaaggaaaatacgcacgagtttttcgtgcaataacgcatgaaccggtggtctttgtcaaaattcattcagagttatttggtatgagaaaatctttacaaaaatgagtacaaagcgatagaaattcataaccacacataatgggtccctataaaaattgattttaatgtatctgcaatttaacattttgagtcaatcatattgtttggttaaactttcatgaatttggattcgtacaatatagcatttttcattcatttatatgtgtttaatttttataaaaaataaaaaaacattggtccacatcattattcatgcgttttgtgtcttatgtctttcgtaatgaataatattactgaattttgatatacttattagcgtaattttttatactaccaattaacatattaaaatcagtttaaatattattattattataaaaagtactggtttttaattatatgaaaactcattattagatttacttttgaattatagctttctcaaccttcagtatacttttatatctttcacttttcttctctttcaaataacagaaattgattactattatatatttgctaaaatatgtttgatcttataaatatttgaattttatatttatattctaataaatttttctttgtattgaatttttaataaaataacaatttttttgttctgtcactactttttaatatttgataaattaataaattttatgttttttattttattttctatacattattaatgtataaatatattttttctacgttggagccaacgaattctgacataaaatgatgaaaaacatatcaccaacttccttatatctcattttttcttgtggatttcaaactcatctctttcaattcattcattcaccggtatttttattctcttctctttttctccgtaatctatctttacacgctcaattattagtttctctctattttgttcattttcttctccttccctcacgtgaaagaagattcgtttaatgcaaacattattctttgaaatttatttttttcctaacacccagattatccaacattttctggcagtttgacaagcattttcattatcctccaattcgttgtaaccgaaatatcttaaatttaaggttggttgctgagaaaatattgtggtttcaatactttttttataatgaacattttggggggtttcatcacttggaaaatgaaaatgggaggagggggttaccccatattcttattatttatttatttattatgaacgaataatgtacgtaaattcatgcatttatctaatgctagtgtaaaaaagttcaatatttaacacacgtacaacattgcaattttgatgtctgctgataataccaaaatttgaccttttttcttaatggaaactgggtcatattaatttattcaaaacaatgtcagcaatacatcaccgaactgatagagaccagctaaagaatttgcctcctagctaaactatgaccgacagaatttgtgtgtctcataacaaagcaaacgctgaaatttggttaactatgaagcaagttatgacattgatcaattattttttaactcttattttttatgcttgatctatctatctatcttccccttaaagattaatcagactaatctgcaacggagttattgttgatcatgttaattattcaaatatatttttgtttttttggggggttgggggagagattaaggaactaattaaggattattgtagcagaaaagttttgttattatagcatttcttgagggatttgttttgttagtctataagaggatatttctttctttccaggtagtttagtttggctgctattactgaagttgcagttttgaacgattgctggcttcaagggtgccaatgaataatcaaccgttggagtttgggaggcctgtctcaagtatgctatgattcttaatttcatactctcatgtatttaactgatttccccttattaaaatcaatcatttactttcttttctactaatttactccccctcttaaataaggataagaataaataatgattaagggtaagcctaaaaaatttataatcaatacttcattggttttccgtttgttaatgtcctaaagcacattcaacccaatccatcgatagtgtgattgaactgaacgtccgtttgaagcttcttaatgaaacatcaaacatacttttaatagataaaactcggaggatttgaatccatatttttttattgaagttggaatgattgatcctgatatggtacttgaatgactgttgggtcacgtgatggcttatgcatttatacagtttttctctggtgtatttagtagttattgactaacttcatgatccctgatgagtggtttttcaccctaccagagggaatacttaaagcaagaatatttttccatctttattaggttgcatatttgttgtcaatgttgttgcctagtatttttaatattgttttattattttggtgcacgtaaggtttctgggatttcaaataatgactggatggttgtgactggaaactgtctctataccaagctttattggaatatttggtcttcttgtcaattgtttggactcagagagcttgattttaagcatagcagcttaagattctttagaaattctattacagaaataaagggatgtttcaaattgtgctggaagtggtgaacagctcatcattatacttataagtttattaattttatcaatatattacaaaaacattttcaacatattgtatctcttgaaaaccaaggcttagacctgttggcttttgtaaaagctacaatgcaaagtaagccttttaggttaggccaagcagaaaacgaatagcctatttcttataatagactggactcatactttatgtttgaaaaacaggcttaatctgtttaaggtaaatctgatgttgcttatttccatgtccaattgtcaatgtaaagttattttcacttatttttcttgagaagttgaatgattggcaggtttcttacaggtaaaagaagagtgaaggatttattgcttcaaaaagataatcgcttttgtgctgattgcaatgctccagatcctaaatgggcgtaagtgtattcaccattgtacatttttttgccgtgtgtgtgtgtggtttatggtcatggtcaccgattataatactcaaaactggagtctgagtgttgaatattttctgggaagaatttataaagcatccttgtgattaaattgtagtaaactggctacatgaattttcctaaattgataatgtggaatgcatagtacctctaagttgtgaatccatttttctaactgcttctacaggtcagccaatattggagtttttgtatgcttaaaatgctgtggtgtgcacagaagtcttggctctcgatatcaaaggtaactattcctaatccacttaagagtttagaaagaagattttcactttactaataaggaatttaaactgagttccttcttcaattgtctacaacaaattgagaaactaatatacctatagatgtggctaatcattttttgaaatgggttcaacttgatttgatgagaaaagaatcaaccactcttatatgtctatactcatgaatagtccggtgaactttgctttgtcaggggtgcattattttgtttcagttttactgccttatgttgtgggggtttgcagggcagccttattcttagattccatcccacaacatgctgtgatatgatatcttgtgaaatttagacaaaagaaacactaaaattagtgatctgagactagaagtgaaaacttttcaaataaggtttcttttcaatgtactatttatttatcctgtaatatagctgtaatcactaatctttcaggaattttcattgttaaatgaataatactggtaggaaaggaaaataatatcttatagataattattacaaggtatctcttttcatgtctaattatgaaatgtgaactttcaatttagtgttgccctctgccactggatcgtgttatttgagtttctcttggtctttattgtcaaatatgcacatttttctttacgtggtttaaaataaaaattcagaatttgtcaacttttatattagatacagggtgctagtgattttttacatcaaagcagatagaaccaacagctagacacaggttctagctgtaataagtgagaagtgagaaaggaatctctgcaactcttagctacgaagtaaacttgttattttgattaccaaggtcattgcattggacttttattaaatctatgaagtatgatccacattttaagaaagttagtcatgtcaagtaaaacttagtttaaagcttatgtagcatgaaattaggccaaataaatattcagttcttcacagataactaaatgatagatagtgtgatcattctaccagtgcattaacggccctccaaatttatcactctgcctactagttacctgtgttaggatttcgtataatgaatgtactatagccaaggtgctgaaaggcgtacctaagccactgaggcatggtgcatgaagcttttttttatttttttttatcattttatgctgctctcttttcaacgagttgtgtctatcaagttaatagtgtgctgaacttatttatttatgcttggtcttgtgtgcattaaagccttgggacattattttcttactttcaggttttgtctgtgacattggatgaatggtcaagtgatgaaatagatgcaatgattgaagttggaggaaattattctgctaattcaatttatgaggcttattttccagaaggatatacaaaacctggaccagatgccagtcatgagcagcgtgcgaaattcatccggttagatatgttttcatctaactttacactgtacatctaccattcttagcatcattttgcttgttttataaatctattatatattatatttatggtcacacaaaatgggtaaaagctgtagtcaactttatatgatatagatactaacttctgtgccctcattgcaatttttttcttctcatgttttcttttttcttttttaccattttgctttgctgagtcatttattttcaagtttctgttttttttggtactctttttcattcagtccattgtcctggttgataatggactaaccggcatggcgttgggattgctcatggtagcatcatctatgatagcaatctgaccaatgctcaagttaagagtggcattttaattgtggcaatttttactgcaggttaaagtatgagcgtcaagaatttttgaaacctagtttgcgcattgtgtcaggaaaaagcaatcccccatcaagtatatccaaagggattatggatagttttcgaattactagtgattcacagcatatggtaattatattttatactttagttcctttgatggatatgtatttgtttgttggccacatgttgagttagcatatcaaaggtaactgagttaaattgatgttgtacccagatgaaagccttctaatcgagataattatatatatacagcacttgttgcatgcatccaactttactacttggtagtaaatgaaacgaaattattttcgtgagtggtttacttggatgtttgactgatatttatggttaaaacaggaaggaatggtagaatttattggaatgttaaaggtgaaagtgatcaaaggcacagatttagctgtcagagatatgatgacaagtgatccatatgttatcttgaaacttggccaacaggttggttgttctcagttctcattagcataaattatttcatgggaaactttcatttttaattgaagagtagtagatgctgataattttctttctgaattgacttcggtgctatatgccttcagactgttaagacaactgtaataaagagtaatttgaatccagtctggaatgaggaacttatgctgtctgttcctcagcaatttggaatattgaatttggtaaggttcaatttcatcttgtcttgttaggaaatggaaacaaattctgtgatgcttatttggtggttggacatttggatcttcatacgtgatacttctatttgtctctctgtgtgtttgatacagaagatacaaaactcattctggtgtaaaaacatggaactttatcctaatgatttggttacattgcattgcagaatgtatttgattatgacttgttttcggctgatgacataatgggggaagcagatattgatcttcagccgctgataacatccgcaatagcgtacggagatgcaagaatgtttgatgatatgcagataggaaaatggctgaaatcccatgacaatgtgcttatagatgatagcacagttaatattgttgatggtaagattaaacaagacatgtcaatcaagcttcagaacgttgaatctggagaattagacttagaactcgaatggatacctcttgattattagaattgaatgaagcattcttggattgaatggggaacagtaattccaaatcaataactgcacggcacgtcagaaaaaagaatgctagaattgctttcattagaatagttttcgtgtaaatgcggtgtgaattcctacctttctcataggtattggtttgaatttctcgacattatttctctcgcttggtggaaatattaatataaattctcctccaagaaatcctctagcactaggttctgaaatttaaactattaacataaactttgaagatttatattaatgatataatatgttatactaatatttgatgtattgataatatataacaatattttatattgtcaaaatttgttaatataatatataattttgttaacataaattcataatgtctctataacagtcttacactagtttaattttcagtagaaaaaggttacactaacataacttaattcagtactaacacatttttattgaataatttaaaagaataggtaaaaaaaattatatgaagatttataaattttctcaatgaagctgtttttttttacgaagctggtgttgaaagtggtcacaatttaagttttgtgcataattgacatcaaaatataaatgccacatatacattcattatttgaacattaaaatattaatgccacatataatcatttttaactcttgtatttttatttttcatagacccacgttttgaatgtatatcccaaaatcaaatatatttttttacagaaaaataaatagattatttaatgagaataattataatcatacatctacttttcttctacttcattttcgaccttttttttcttatttatggtaattatctacttaattatcaaaataaaatgtacgtgtattgtcaaaagtaccagcaacaagagaattagtgtaatcctagtacaaatgtagggcacgcttgtaattttgactcatattttttgttaccatctttttctcatactcgcattaaaattaaaacttagttattttgtcaaaatggctaaatgaaaaactaatttgagtaaaaaataataattgtggaatgaagggaaaaaccacaaaggacactaaaaatcgcaaggacaacagtacaacataaaaaatgcgcaaacgatcatcaatagagtgagcattatttgctaattaaggtgtctgtcacctgattaacttatcgcagcgtatgactccaagagaaatcaccatttaaggtttaaattccgttaatatgtattcctaaaaaaatacattaatatggagtatgacgcagaagaactaatgaaaaagattgtctctaaaaataaaaaaaattaaaactttgacttccaaattccaatgaatcttttttttagaggaattccaatgaatttattacgtgaactcttactatatatttttatccgaccatcacatgataccatattgttaacaaaagacctttttttttatggcaacaaaagcccgtaaacaatacaatgtggacacaggcaaattttttaaaataatataaattaaataaataattgggaaaagggggtagttggaacaaaatttagcaaaatggggtgatgaaacacgcccagctggggcgtgtttaaacacgcccagatgaggcgtgtttcaccagatggcgccacgtggcaggctgaaacagtgtcctagggttttcgcgatgttttcgtaaattacggaaggtcgtaacttttgactgggacgtccgattgacgcgaaaccggtggccacacgctcgaaattgagaggagaaggcttgggcaagtccccgaagggtttatgttttagggtttcagattttggattttgggtatcgaatttagggtttaggatctagggtttagggtttagggttttcagatttaggttgatggatttcagattaggttaggggtttacgttgtgattagggttttagattttggattttgggtatcgaatttagggtttaggatctagggtttagggtttcagatttaggttgatggatttcagttgaggttaggggtttacgttgtgattagggtttcagattttggattttgggtatcgaatttagggtttaggatctagggtttatggtttcagatttaggttgatggatttcagattaggttaggggtttacgttgtgattagggtttcagatatagtgttgacgatttagggtgtagggcttattctttagggtttagggtgtagggtgtagggtgtagggtgtagggtttaggatttagggtttatggtttagggtttaggggtataggggtttagggtttagggtttaggatttagggttttggggtttagggtttatggtttagggttttgggttttggggtttaggattttggggttagggtttagggttttgggggttggggttttagggtttagggttttagggtttagggtttagggtttatggtttagggtttagtgtttagggttttggggtgtagggtttagggtttagggtttagggtttaggatttaggatttagcaccattcattactcgtaatcatggaaatcagggcccttctctgtctcctttttttcttttcaaattgatctcttctcgaactcgacgtagagactagtaagccatggtggcacggtgggcacttagaggcgcagttggcaaagtaagggttccagttcgagggtttaggcgcgtgggcaagggagatttggaatgacagtaataagaccaatgcccttgctgatcacgattgtaacaagtgctttgctgcagtagtttcgctagttctagagagcagtttgcgggcattaaaggattgctccctaaaccctaactcctaaaccctaaaccctaaaccctaaaccctaaatcctaaaccctaaaccctacaccctacaccctaaatccctaaaccctaaaccctaaaccctaaacccctaaaccctaaacaccaaaatcctaaaccctacaccctacaccctacaccctaaaccctaaaccctaaacccctaaaccctaaacaccaaaatcctaaacccctaaaccctacaccctacaccctaaaccccaaaaccctaaacccctaaaccctaaaccctaaaccctaaatcctaaaccctacatcctacaccctaaaccctaaagaataagccctacaccctaaatcgtcaacactaaatttgataccctaaatcgtaatttctcgtagcaatgtccgatgaagacgtattctatgtcagaacgctcaaaattgagaggagtaattagataaacaaagaatagcttgcaattcactgattgagtacataaaatatcagaaaataaaaaaaaatttagggcttcaaaacttaaatcacagttttgagacacttagaggcctcgtttgggaaaaaattttgggcaagtcccttcggatcttgcccaagccttctcctcttaatttcgagcgcgtggccaccggtttcgcgtcaatcggacgtcccagtcaaaagttacgaccttccgtaatttacgaaaacatcgcgaaaatcctaggacactgtttcagcctgccacgtggcgccatctggtgaaacacgcctcatctgggcgtgtttaaacacgccctaactgggcgtgtttcatcaccccattttactaaattttgttccaactaccccttttcctaattattgatttaatttgtattattttaaaaaattagcctgtgaacacattaatcccacatttttcctaaaaaacgaatatggtttctaatttttcaatcaatgcgacaattcgtagtagatatacaacaatagtgcactttatacatgaagaaactcaaaattaaggctttgttttaaatttaagatttttcttaaatgaagttgatgttaaaataataattcatgtttaaacaccaccttttaaaagtaaaatgacaggtattaatttacgttttgttcgaatggtaaagtaaaataggttttatactataaacataattattttggtcgatcattccggtcatcaaaagaagcacaagatgaacagaaaaaagtaaaataattaaataaacaaataatatcataaatctagaaccgctaccctttacatgcaacgtggaatcatatatagaacactagctagctagtgggaaacaaggaaaaatcataatcaaaatcaaaatgaagcaagaacacacaacactcactcaagggttgcgtaccaccaattgcaacttgttgttgtcttcatcatttccaccttcattctcattctcaccgcaaaacgctgcgtttaacttctgctttctgtttctgtttctgtttcggttcttgaacaaatagatcaaacccgaagccactagcagaaccgcgccggccacgccgcacgccaagctcgccaccgtaagcgccttccccaggcctttgccggagtgtcctctgacaggttgccaccactccggcggcgaggcgtctccggagtccatagcccggggaagtgccacgtcggaggaggaggaggacatcgacggcgaggagtcggcgctgttgaagaaggatcgcatctccggcgaggaatgcggccccgccggcgagaatgtctggaaggtgaggccgtggtccgacggccggagctccctggcggaggaagctccggcgagaatgagtggcacgaagacagcgagggcgaaggtgactacttccatgaagagtgaatttggagtgacggttggaagaggaagcatatatagagagaaagatggaagtgtggtggagaatacggtgtcgttttgaaatgggcaatgatgagagtgggagaggcttaaacttaaagaaagagaagaagagtgggttttgttttgtctgagtgtggaaaactgtctgttttacattgtgtcggaggaaaagcttacttcctcttccaccctcgccgctctctcctttgtctttttactaactcactttttcttttctttaagcttggttaataatgggataagtattctcctcaagtttattaattacaaatttttatgtttttattttcttctcattttatgtatataaaaaaaacaataagatctgataattaaatggacacaaacatagataaaaggaagtatatagtatgaacacatgaccatcaactttgttaagttcgttaatttaatcataaaatggatacaaacattactacagtcagtacaatattagtgaaaattctatttgttaagccaacaatttcttatcataaagagaagattttgaacacgacaagtgcgagactgcaaagtcatgtgtattataaagagttgtagaaagtgacgcaagacaatcaatctaaggtcaactctcattaatgtacgtagatttaccaagaaatctggcgagtttgtcgttgaagaaattgtaatttattcccatttcccgtattagtaattgacatgcaatatagtttgcgttgttaaattagattagtggtgcgagtgcgactatatatggagaattttaagcattaagatgataacgtaatgggttttaattttatagggatgcgactaatatatgagttccgaacgtgtgtgtctcatggaagctgtttgcgtgttcaagtttaaggacctgagatgtgtaattcgaatctgaaaattttgtttagcatgagagagacggtttgaaaaagagaaaaccaatttttaacggttaccagttatcaaaaatcatttaatatatatatatatttcaaacgagttttctaaacatttttttaaaagtttttaaatgtcaaaaataaattccattaaataattttttaaaaaaatacacatagtaacgatcatgtcatcatttaacaacaaaatctaacagttgcaaccaaacataatggaatgaaagttctagaactaaaaatttaattaactattttctttatcctaatcattaagtgagttcttaaagtttgtcgtgaaataaagtcaactttgacgcaaaaaaaagtgtgctgtgttaggattaaatccttaatttttaaattttgaaatcaattatacatattttttttattttaaatatttttatgttgactcattaccaatttttaaatatgttagtaagtcgtttcccttgtgaatgaagttttcaatactgaatcaaatatttaatttacatagaaataatttatgaattaattggaatgtacatcaatataaaagttttttaaactaatattcaactataaattgttgtgtatgatatataattacttaaatagttatataaaatagtttctaatagttgatacttttcatccacaatgcatccaaactaaactcatacttttcttggtgtagctttttcttttttatatatcgatcgaggttcttcttgttcagctgatttgtttttctatactcttgtatatgggttcttggtacccctcgtacctagcaatcaatatatttttattttctgatataaaaatatcagctttaaatatattgttttgggtaacgggtacaatttcaatactaattatacgtgcatggaaaatgttagcaaggaataatttccgccataaccagaatgtaactatgtaagtaggaaccaaccgagaagaggaaaaactaaaaaaagtaaagcaggagtgtgacaagaaattccaaggaaaattccgaagatgctgccgggtttcactcctgttatagaattgcttttgtgaagaaaagtcgtagaaggaaggaatagtataaaagataaaagaacaaacaaataaaaaagaaaaagtaacagggcaaagacatattcgaatgtgaattaaaaagatacaatccatgtatgtactgggggaaaaagagaaagaaaaaaaaaaaaaaagataaactccaagttcaacaacgcttgttttagtgtaattacaagtattttttgcagattatatgcttcatctgtaaaagatgtctagggctctattccacatggcccttgacctacgctttcattattcatcatggatgatcggtgttcatgtactccaaaaagaagtaccgaataaagaattgatccatgatgtgtctctctccattccacataagacttcctttgatgaaaagggaaagaaatacatctaatatatacacacgtacatagaaatacatctaatatacagagaaagggataagatgagtgaattttaaccatataattcatatagatagttaagatgaaaatgattaaaacaactttgatcgcgctcatgtataattatgtgttccaaagtcatcatgtattttttttaaaagaatggttatataactttaatcttaaatattcagtatagtttatacaaatagatttacttcttaacttttatatagaaataatttttctactaactatatctcatatagagatcgagatggagagaatccttttaatcaaagtatctagtataaaattcgtatgaaagatataaacattcgatataaattacaaattattaaagaatttgattatcattaccattattttagagatttaacctttttaaataagtgtcaagaaatcattaaataataatcttttttgtttctcataactattctcacttaaagacaatttattcaagacaattttatcacctcttctaaacctagttcttcatgaaattaattccttcactaaatccaacctccattgatcattaaacaataatcataaaaactatacaaacaagacatcaaaataaaaattaattaattttgtattagattagagttctttttaatcattttattagtgcaaaatatccattaacttgataacgattgttctatgcaaagaaaccttataggcttatattatcatctattttagtcaataagtatctttgaaaatttcacgattttcttgtaacgtgacattattatttttaacagacaaataagatattcaacaaaattcaccaattttttttattaatctaaacatcatagttatatgtttgatcaaaattagtagtgcatataatacttcgctgtacgtttattatattcaataatgacattgattcaaaatttatttcccctacttcgtcttctttttttgtttcttttttctcttgaaaacgtgtcaagaagaaacttgaaatttacagcacaaaaataaagcaagaacagacataagactcaaatatgcaataattattgttggttgggaaacgatcattcaacatatggagcattgcttaattggttttgttatgatgccgaagtatatacattttctcatacaagcctcgtgctgctgattatataacacatggaagggcataactaaagcttccatgcattttcgcgccaagatgatgtttccttgtttctatgcgcatggaggtatacttggggtgctgaatcaacctcttctaaagtggtagatatatgttgttgatatgagagaacacaaccccatgcagagggaatgttggtggtgtctagatattgatgttgttgcttttccatttgcagttttgcattgcacctactagtactttgaaactaacgtattctcacattcctttcgttgaaagattgttagggttgaaaggtagttgggccagaaaattttggttgttcgggatgtgtacaaaagataaattatatgtagctcaattttgaacatttatttatataaataagagcgagataaagaaaaaaaaaaaagaaaagagatagctgatagatgagtgatgtaatgagaaaaaataaagtgaaaattgaactatgagaatgttgtaagaataatatattttttgtacaatggtcacttttttgtacctatatattttgtcggcacaaccaccggggtgggttcatgggagatggattgtattccacttttgcatcattctgttcttctagtacatcagcagaacagagaacaaagtgggccctatatgttaaggccagcccaacgggaagcccacaatgtacattctttagtctttcaaaaaataatgttacttattaatttactatgttttaaagaaacaattaattgataaattatttataaaaaaaaaacacaaaacagcttaacattgtattgataaaaaattcaagggtcttgacagaaaccaggaaaactgttataagagagtattctctgtgaacaaattaattatgctattaaacactgatttcgaacaaagtttaccattaaagacaaaataaatagtcttggtaagcttcctggcgtaactctgatttctcagaaacttgggatccattctttggttgtggtggtaattctgggtttcttgatgccattttgtgggctttggtacgacaggtcgtaggcagttgcttcctgcaccctcagaggacactaatacccttcttgtaacccagcaccccattgagcggccacaattcacccagttactttatttgtggcattggagcctaacgatgtaatttgctctcttggtttaaatacttttttccgaaatttaacgttttttttataattttcgcccttttaatttttgtgttataatcttgataaaatgtatttattttatttttatttttacactattctgaacagtaaaaaaattaaacagtaaaacaaaattatctaaaagacttccaaatttaaagataaaaaaataaacacgtcttgccataactaaaacgataaaaaaaattacaaaacattaaattaccgataaaaaaagtatttaagcccttccattggtagtataaaatttgactcaattccaaattgaagatcggatgaaggggtattactaattattacacgtaggtggaatcataaaaaataatgatttttaacaatactagtagagaatattggttggcgaatatcgaaccataagagaaagagagaaaaggaaaaggaaaggaaggatctgttggaaattgggagcaaaaggaaagaaagatgcaggatctgatgtgcggataggagggtccaggtagtactacacaacacattctgctaacataacacaacataacaccgacttttctctcaaacgaacgacataattcaactgctgcactgcaaaggttcatttccaatctctaaccctaattttcctccctccaattcacctcgaggaaccacgaaacaaattcactttttctattttcgattggtttaatggaattcccttgtttaagatgctattcaaatgttccgttatctctttctctgcttgtattgaaattgggtttaactatgccctgatttttcttaatcagattgaaacttattttgaagaatgaacgtgggttttggttttgtgcttgggatgtgaattttttactctgttttatctgtatagaatgcacccgaaatacttctaaattcagttaacaatctctgttctggttccaggtttggacaatgttacgtgcttcacgaaacatgacctctgcgcaggacattactggtattttacatgaacaatatccttgatccattttattgttttactgtaacttttccatttataattagtggcttacccgcatgttttaattttagttaacaaaaaacaacacatggagcaatatcattggtgtttttgtgtctaatggaattgttacaacaacaatagccttgtccagtctaatggaattgttaatggagaaacttctattcaacacaaattagtaaagttgaagatggaaaagatgaataactactgttgtgagtgcagtaaaatcttcttttatcttgtattttgtgtgctggaattattccttagtgaaaatcataagaaatggtaaaaaaacacctttcttaaaggaaaaaaatgtttgcataaaaactcatgtttcttactgtctagtaacttttaatgtttggctacaattcataggcaactacactggatgttccttttctgtattggttgccttgtgaaaattattattttgtcataaaattattttcaccactcagtgtcatagatctatagctccctgtcttttgggtttgcctatgtatcttttaatcatttaagtcattgaacccatactcttgctcagaagctgcataaatgatttatgccttatcttcatcctcttcttttgcaattacgttgtgtgtaaaccccttcgcagtccaccctccagcaaggcagaaagaggaaaaacatgaaatagacatttaggcttcacttttaatcacgtgtttgctggttttctgagaagcatcttatttgtatgtcttgcctagggactgcaatcaatatatcctagctattttatttttcgttattacgcacagcttcaccttacactatctttaaacttaaagtatcttattttagcttcaaatttgaacttcaaaacttatttcaactttaataagtcctgtactcctctaatcctgtaactatttttgtttttaactaactcctgcactggccacccgtctgacctacaaaatatgtcaatatattgttattgctttgctgttcattagagtagaacctatccctcagcaactctagtgtactctagattctaaccttcactgtgaaaatggtgaactgtaataactaataactatgaatgtgttcatatattatattggaaaaaattcaagtcccacattggctagagatagtgtcaagacagagtatatcagtgggaggcaaccttcaccccatgagttagcttttgggattgagttaggccaaaccacattttaagatggtatcagagtctatcctagattcatcaaaaaaggtcacctaccatattatccacgcaccaaactaaaaagtgttgggcgtgaggggatgtattggaaaaaactcaagtttcacatcggctagagatagtgtcaagacagagtatataagtgggaggcaacccacatcccatgagttagcttttgaagttgaattagactcaaactcacattctaagtattatatgctatagccatactacgatactaatacctgcacaagtgaagccaaaatgtctatttcatgtttttcctctttctgcctcgctggagggtggactgcgaagggtttagactttagatagtattagtctttaggtattattcatattcatctacttattgtgattactcgcctttcttatttctgctttatctatatcagttcccccttaaagttgtctctttgaacataagactcctttgcattctgacttggtaagaaatgaagagtcttttgtatctattgcttgagaatatttatgttgctttccctctcctttgtatttctttttccacctttgtttatgattctctgtttcttgactgatctattgaattagcctcatccaggctaattttttaaaaattcataaagggattagttttagaatgcaggagtttgaagtaatatcttgttatgtagctgaggaaattattttctagcaaaaaaagtgtgcattaagttgaagataggtaaatttaagatgaaaggaatgaaattatagggctcacatgtttggtagttgagagatttgggcagaaaaattcacttcaaactaatgttttttgacaatcactgtttcttctgtatttacaaactcaacataaatctggagtttgtgttcctattgtgatatatgcttctacgttctgattgctgctcatgcattataaaacactaggttcgtttttaagatattgtgttaattttttattgagcttctttgctattatcctatgaagcatttcacttgttccttcactccatcccaagcacaaatttactgtctaaacctatgtagcaaaatgtctatccagataatgaagatgatggacagcggcagtcagaatcaccaatgcagtccccatctgcaaatggatattgatccaggtattagtacccagaatgtcaatgtacagtatgcagcacctggccagcttggaactgggcatgcaatggtatgaacttcaagctcctttgggtttcttctgattttgtcttggaagaacaaaatatgtttcttcaatgatttgacatcatcagtccaatttgaatcagctcctaatatttaattaattccagaaatactaaggaatattttgttttgcaaaggccatagccattgtatatcatccaatgtgtcttgcctgttgtaggtataagatagacacacattgccgttgttttgtcattgaagcaaattgactctgaatattagcaaatcatgatgaaaattttccccaggtttattcttcctctaattcatgaataaattggctttttttacattttcccgtgaaggtggcattcctattttgacacagcaagctaatttgaaagtagccattaaatttcttgatcttgtaatagttaaaactgaatttcttaatcagtacctactttgcatgcgaaaacttaaggcttctggtctggcaaataatgatgcaatctgaagtttttcttataaaatgttctttagaggttgtgttttggtgaattaaggttgatttttaagaaaccagagttttttgtcatggatattgaaggcaaatgataattgcccgagtgagtactggtgtcagttgttatttagatgtgatattaaagtttgttcagaatcactgtttgcactagaattgttcttggtatttgattttaaaatgtaaatttcttacgcattgtactaatttatgttactttcttatctaattgaaggcaccacctgtgtatccagatcctgaccttactatagaagcatctttgctccctatgatacacaaccttatcccccacaagcctatagtgggcagccaatggtttgctctaattctttaatgttgattctattaatattatagtggcttcttgtgtctttttccgatcctccaattattaaactttatgtccatcttcagttaatgggaattcagcaagctggtgttcctctgccaactgatgcagttgaggagcctgtgtttgtcaatgcaaaacaatatcacggtatattaagacgtagacaatcccgtgcgaaagctgaatcagaaaataaagttataaggaataggaaggtatatcattctctgcatctttatagttctttctatgaaccaaaagtagtgttgttattgttgtaagctgcttgcttctcttctctggaagtacttacttgttcttataataaatcttgcagccatacttgcatgaatctcgacacaagcatgcactgacaagaccaagaggatgtggtggtcggtttctgaattcaaagaaagacgagaatcagcatggtgatgtggcatcagctgacaaatcacaatccaatatcaatctcaattttaataaaaacgatcaaacttcatcagatagggcatcctaaactacagaaatgatgataccttagacagtggggatctattttatgtcacaagatcaataatacctgctttggatatcccacttttgcttcattctggctttgtacaacactgtagtggtgtggtaggtagcgttaggatgtcgcacgatgcaggtaaaattaaattggttattttatcaaatattgtcctttggtaggggagatttttatggtgatcattcctttgtatttggttctgtagagaggttagagattggtgttttgtttggttgaatcgtatttatttaccttgctagtgacagttgaagaagtttcaaccatgattggtgatggatattgatagttgtttttgttcagtgattaatagatagataaataaggttcacatgacttgctgatattgaatgaatcccgtctttggttagaatttgtcctaccacccttggcttgaaaaaataaatgttacatatattttatatgattcttttatatctatatatatctttttaaaaagttataactaaaaaagcattttaattttttacctgcattaacacgttaaactcaattatatcactattttataaccatattgtttatgaaaagaaaactaaatttactaatgataaatactcaattatatattttataaaaaaaacattcaaataagttaatttaatattattatataataaaaataatttatatatttattattacataaaattagacatgataatattataattctaaagacagtcaaataatgtaatgacaaaatccggaatatttctttaaaactttcataattataaaaactttaacataataagataaataaaataaagaattagtatttgttatcaataactattattttgtataaaaaataataactattattttgtataaaaaatattaataacttatttaattcattaaataattataaaattatattccaaattattatcctctaggtattaaaatactttataatcatatacgggacattttcttacttttattgctatctatatctatattattttttttttttttttttttatctatatctatatagtaatcttattttctattttaaaaaaataacaccgtaaaaagtaggagattaaattgagtaactcatttaatgttggttttaatctttatcatttatttttatgaaatttaatagttaataataattatttattataatattagatttaagaaaataaattataagataaaagagtaatatttatttatatattatatgtaaaggaagttgaacttttgtgaatagtcagatcgaaattttaatttgtcaacaatcattaattgatttgatatataaaaaaagttaaaaatttatctatcgttggatcaaattttaaattttaatggttgatttcattccaataaatatatatcatacttaatatttgtgagttattagatcaagatttgagttcacaacagtcattaatttgactacactttccttccactcaccctcccctccttaagaattacataatcttttctttcatctctccattcaatttcatcatttttgcatcctctttgtgaattctctttgcatcttatttatcttgttaaaacaattattttgttacttttgcatcttttcttgatgaattttctttatgtgaatttatatcttatttatcttacatatctttattttgtgtgcatgtacatatttttgaattagaaaaatgttctttagtttgtgaataaatttgaggaatcatccttatctttgaaattgagcaaccatgttatctctaaaattgagttataatctttatagtatattttttcttcttcaggtgttatgaaatacttgatctgaaacatagaaaaaagtaaagcaatgagcaattaattgatagttttggagattcagaaaataaaaataagcatagagaaataatttactttgatcggaagagggaaaacaaataagcactgagacacgcgaagagaaaaacttttgcattttatagacttttttattgtgttttctttttacgccttcgttcttttattaaaacttttgttatgtatttcatctcttctccttttttataacgtgtttattctttttgtgtgttattatatgtggtatcatttatgtcatgagtatgttttatttcaatgcttgtatgagtttattaggttcatttttaattgtggaagttcataattgtgatttctcattatccgtgtcttttaatcctttccatcttttgtttgtttacatttttctttttatatatatactgcatataaatattttaaaaaatatgatttaatcaaagggtttaaactctagtttttatgataagaaccttatttttttttgtacatattttgaaatattttttcatatttattttttcatctttgttattcctattttaatgttgaaattcttaggaaaaaaattgctcattcaagagagaatactgaaaaaaaaaaaaacaagttatcaaataaaatataacaaatcatcaatcctttctttatatctaatttatatattttttgacgtgatatctaattcataatatatttttcaatgattttcatgtgtttaattaaatagatttcatatagaatagatcataaattcactcctatgtctaattacgttcactaatcaattgatcatactagtagaatcggattttgtaatttaatcaaacttattttgtttttgaattggatatgcaattaatttaatcaaatttgatcgattcttaattggatcagtctgatttaattaatttttaaaaagaagttgaaaaaaattatgaaatttatatataatattaattatatatttatatagaatacatacataatttaaatttttaatataaataaattaaactagatcaattactataagacattgcttaaaccactaatccactaatccatttagttgatcacgtgaatgaccgaacccagaaagcatgattccacttctaataccaaatacatttgtgagactggacacccgaaagaaacaaagcgttttgaagagtattgttccgctctcatagggttctattctaacaaagatggcagcgatactcggtgaggacctgatagtggaaattctcacatgggttccagtgaaatctctgatgcgtttcaggtgcgtttccaaatcttggaattccctcatcttccatcccaccttcgtgaaattgcaccttcaaaatcaaagggcttccaaaacacccacctcctattaaggtgccgccgagatagcatgtttaatctctctgacgaattcatcggaccctgttctgttcgcattttacttgagaacccatcatccactgttgatgatgcttgccgccaattatagccgggtactttttcataggttcctgcaatggcttggtttccttgctttatcattctcgttctcttgttatacatggatccattgaataccgggtccggttttggaacccggccactaggatcatgtccctaaatttgtctcacttaactttccattcatcccaggatcatgatattggctttgggtttggttacgattatttgagtgacacttacaaggtggtgtttctcctttaggacattaaatcaaacaattgggaggtgagagttcactgcttgggtgacactgatacttgttggaggagaaatacgtaactgtaacttgccctgatttcccactttggggaggacgcgatggtaagcttgtgagtggcacttttaactggttagcagttcgctggcaaaccgatactgtcaatcagttggtaattttttcgtatgatctaaacaaggagacatataagtatttgttgttgcctggtggtctttctgaacatgctgataaccctagtcttggggttttgaagggttgcctgtgtctttaccatggtcaggagcaagtaagaacccgttttgttgtttggcttatgagggaatttggagttgaaaactcttggactccgtggctgaatatgagttttgagcttgttcaactcttggactccgtggctgaatatgagttttgagttgttcaactcttttcaccttggcaattattggcagcgcctttgtgtatgtttgaaaatgatgatgtcatgttgctggcaaactatccgcttcccaatacattttctataatcggagagataatagaatagtccgtactaagatttcaatgacaaagtgccgctgttctcccatgatgattatgttcaaagcttggttctaccatattaagctaccctatatttgcttgcatgaatttatgttaaattgtgtaagtgatttcagaacctcgccatttcatgtatcgacatgacagagagtgaataattttggtggttccttagtttaattactttgttggatgattctatttctattggcaattgctaattgtgtgtgtctgctttggttttgccttaatttccttttcctgattgataccttgttctcatctccagtgaggcaagggaagtatttggggttccacttgaagtgcgtttagagagtagagatactcattgacataaatccactgaaaaggccaatgtcactgacagtaacactgtattgtataactgtataagttatacatgtcatgtggctaatttgtactcaattatgattgttgcccttttgagttttgacaacaatgaaacaatgtattttcttattatggtgcaaagtactttctttgttttacaaagttaaactgcggtgcatttcattactgaaacatatttcttataatggatatccaatacaaatgtgtacatttcattacttaaactttacttttttgtttacatgggcatctatagttataggaagattaccaacccactctgatgcaaaatagcctttactgcaggtaccactgttagcacagttataacttggtctgtaaatgctatacaattcacatttcaatcataagatgttaaggtgtacatttaccaactcttgacactaaaataaatcatgtgctgtaaatttacaatttcaagccttccaccttggtctaaaattgctgtaacttacccagttacagtggagatatctgggcttggcagtaggaatagtttgtaatatgagtcattaggctaggtaagtttcaggcacattgcaagcgataataaggtttgtataaacagctgatcacatttttaagacttagtcttacatgccttacttgtagcagataagaaaaatggccaaattgtagctcatcacagcatactcaaattgatgtatttaataaatgcaacaggtgataatggaattattggtgagcagggtaaaataagagacagtattcttaatttttttaaaaaaaaattggattcaaagtacaattgtggccatgtttactccactatttttattattttttataatatttaaggggattgtagtaacttgaataattcattgacttcatatagtgagtaaacttaaagaagaaatattttagttttgttgaacagtgaaaaggcaatagtatagagtatattaaccttgagcgatattatattttattttttatgggcactgttttgatcaattgaccttgagtaatgcattacgagttaaaatactccttacctacatctttgtattttttttctctcactctccctttaccctctcaagtgttcaaccttgtagccaccgccaaagatggaagatgttgtcgaggacttgctaggtgtccatgtgtgattttagtttcgggtttctaatcttccatcatcttgtttttttacttcgcattttgtttttaatttgataccaatttctagggatccaaaaaatatcttttattgttaaacaatgtatattagacaactataatttattttaaaaaaaatgaatattcagttgaggaaataagtatccaattttgacctttcaattaagatgagaaataagaggaaggaaggagaaacacgtaccaagcagaaaacaacaacacgagcatatatacgaacaaaattcctttcataagaaaacccatccattacgttatcctttctacactacactgccaaacacaacataactacttccggtcaagggacaaatccaaggaaacactaatctagaaaaggcaataattttagcttattcacgcgtgttatattgatatttttatttgataacttttttttatatttttataaacataataattatttcggaaatggttcttggtacgaaagataatacgtattaaaagtatgaatggcatgacacacgattccctttcatattgactttctttcagcaatgagccaaatatttcttattaaaatttcaatcgaagttcaagtcttccaggccttctcttcctcccttatggtagtgataacaaataaataatgtaaagcccacttataattgcaagttttttttttcttgtatttgaaaggcatcatttttttgcttattttatatagtgtccttcttatcaatgatttagggaccttctaaaaacttcataatcgaaatgtataatctattttagaatatataccaaacataaaggacccttttgtgtcatagcacttgtgagagagcatacatgattagtgggaatctcggctagaatcagaaaaaaaaaaattaatattttatttttctaataatattttaaattattatttttaaaataattgcgttgcacatcagaaattgaaatgaacacacggctacacatcagctatttcttgcgttttggtctagtacattgctgttttttatatcataatttatgcatcaacccaatgatagaaaatgctttttcaccttagtttttgcttttcacgccccaaactttgtttgttatttctcattttttatacacctctgatggaaatgcaattttggtgtataatatacacaatgaaaatatgttttcactaaattaaggggtgcattctccatataaaatgaaaatgcattttagttatacacaatacacggcaaaaacacatttatgttgtataattaattttagatataaaataattctttttaaaaaataccttttccagttcaacagggacaaataagagaaattacattaaaataaaagcggagttgacactccactaagataagctaggagcaacaaactcaacatagaaggaagttttgattcatacttttttttattcatagacaaaaggaagttgctacatcataaaatcatcctgagcatcacatgccaagtttgccaacgcataccttttagtagtaatacaaaatctaattaattatgacataactttctccttttaatagtaatcgaatatgttacaaataattttttttcattgaaattaaattaggtatgatagaagttaacatttataataaataattgaattaactatcatacaattactttttttaatagtaaccatcgattgattaaaaatgataatttgtgtcatcattgattcaaaagtattttatatcataattatttatattactattaataacttttctgatcaattatcgttaagataatttgtatcataaagttcaccattgatgaaaagagagtattcaaacaaaattgaatgtgagggagtagagagagtgaaggcatgaaaatatatatatatatatatatgtggtgttgtggataataaacaaatatcataaaaggcacaaactctatatatttttgtttggagaagaccgcaaaatattttaatatgagtgactatattttggtttaaaatgaaattatcaaaagaaattgtattattttctattacagaggtaggacaacggataatacatctgtcatatcgtatcggcgaaaaaaaaaaaaaaaaacttataacaattgtaaaataactatcatatcttttcgtatattagccaccaaaaaaactctaaactctctttggaactcatctttatattcttgattttttttaaaaaaaagtgaacatatgattctttttaagaggaacacgaattatgtattcaggtttcttagggaaaaaaatatttatgtgattgatgagataattaagccaacagttcatatagaaataaataaatagaaataagactcgggtggtgtataaatgtactagtattttttttaatcattcggttcattcaataaattatgactaatttagagtttagttaaaaaataaataaagactaattatttttatcaatatttgaattcgagtaatatctatacattcaacattaactatttaccacttatgttgaatcacttagcataagtgtattagtgtagatacaagatgataccacaaaaataaaaaaaataaataatcaaatttgtctttgaaagtgtaatatggtacaaataaattcttgaaagatgaaaatataaatttagtctttcaatgtgtaaaaaataccataaattagtctgtagttaaatttgtgagactaatttgtcattaaattgtaatgttcaataatcagtttaataataaattgtatttatggaggaccaatttatattaagttacaaagtttaagatcaatttgtcattaaattgtgtgcatgattaatttattgtactttttacctattcaagtattaaatttaatttttcatgggaccaatttgattatttacccaaaataaaaagaaagcttaataaatttttaatacttggaaaatagatcttttcatattactatctaatatattttttccaaataagtaccttaaaaaaattatgtttcaacgcattatctgtcgttagtcccctttcattaagtgatgacgtgacagacaaaatgttaagtcattaaaccttatcactaaacacatagcagatacaaccatgtattatttattaatttattaaaaaaaaatcatccactgctgcctacccttctcattgctacttttgtcattatcgccgccattgcatctacaccaaagccgtcaacgacaggaaacctccaccatttcaagtatcctttattttcattacccttccacctccaaagaacaatcaatttagatcaaattaaacctccattctcaattggatctcgattgtgatacaccttataaacgaaagttttagatttttaaaaaaattctaaaattagaatgcaaatttgttttaaatgaagtgttcatatttagatcctagcaccaaacaacaccatgaaccaaccctgaaccgtgtgaaccaccacgaaactcatcaccaaaaatcattgcaaacccgccccaaagcacaacaaaaagactacaagccactacaaatccaccgcaaacccaccacggtggcaacaacaatgaattttcctctctttcttagatctagaaaccagagtttttcctttctcaaattaaaaacacacacagacaatctcttttatcaaatcacataagaagaaaaaagaataaaaaaacaaagtgattctgtcgtcaaactggatcccataacgggttaggttgagtttgagtcagggtctaggaggaataataaagatggcaacaccacaagtttggtggaattggtaaaagggggagaaagtgaaaaagaaacaaaaaaaataataaataatgacatggtcatttttgttatatttagtgataaaagtttcatctgttatatcatcgtttaattgaagggaactaactatatatattgcgttgaaatataattttttttccaggtatttagttaaaaaaataatgttaagtaatattgaaaatgatctgttttcaaataagaaaaacttaattaagcctaaaagaagaaaaaaataaaacaaaataaaaatgggcttgggcgaaaagcgttgctgtatggtagtagtagcggtcatcctcattgggcgatggatggatagatagatataaaagactgcctcagtccgtagcataagagagagcttaaaaccctttcgctgcgcctcacccaatcctaaaaccttatctcttcttcatcttcatcttctctcaaaattcattccaatggattcttcttcttccgacccttctcttccccaaacctctcttctcgtctctgaccaatcaccctctctccctcccggttccgactctgagaacgacgatggcttcgtaagcggtgaagagggcgatttggaggccgaacccaccaagcccgttctcgtcaagtcttctgagcccgtcgtcgattctcctcccgacgagtcccacaggcccattgcgaaggtgtccggggacgatgatgacgacggttccgttgttgaggatgcgaacgacgtcgttttggaggaaggcggcgagaaaaggaacgggggaggcagtgaaggagggggattttagcgatagtaacgaggtctttgtggaggcctctggcggtgatgatgatattaaagagattcagagtggtggtgttgctgtggagaatggagtcgaactgagtggtactgataaagggtttgaggctgctgctgctgttgaattgaatgaggaagatgcgaaagagaaggaggtggaggagaaagttaatgacggtgtgaccgataattcggattctgtggtggatgaaaaagtgagggtgttgatgttgaaaaggacgaggtggtggtgtggatgctgttgttgatagcgtcgaggttaatgtgttggggtctggggttgctgctgttggggatgaggtgggggttgatgagtctgagattaaagggctagacgagccggagagtcgtggggtgagtctggataatggttttgagcccattgagaagggtgaggaggaggttgttgataagcttgttgatgggggtgatgagtctgctgttgaccttgtacttgatgatcaatcgggtgctgaaggtgttgttgttggtggggatgatgtgtctgttgagaatggagttggtggagatgggttgacgagtgacattgttgttcctcccgaggaaggtggtggaggttcggagtttgttgagaaagatgaggtaaagatggagggtggtgttgttgacggagaaaatgggagccgtgtggaggagggtgataaggaggaggaggttggtcatcatggtgacagggagattgatgattcggcattggatgggaaaattgggagccatgtggaggaggttgaggagattggtgccaatggtgacagggagattaatggttcggtgtcggatgagaagggcgatggagtggtgtttggaagcaccgaggctgccaataagttcctggagaatttggaattacagcaatcacgtgccagcgggagttcccgggatgatgagaggattgatggccagattgttactgattcggacgaagaagaggagactgatgatgaaggagatggcaaagagctgtttgatactgctacattggcggctcttttgaaagcggcgtctggtgcggaccaggatggtggcagtatcacaataacctctcaagatgggtccaggcttttctctgttgagcgccctgctggtttgggatcatcgctctcgtcaggtaaacctgccatgaggcaaactcgtccgagtctttttactccttccattagtagagctagtgccatttctgataccaatttgagcgaagaggagaaaaagaaactggagaagttgcatgaaattagggtgaaatacttgagactgcttcataggctgggttttactacagaagagtcaatagcagctcaggtactgtaccggatgacacatgttgcagggaggcaaagtggtcaaatgtttagcgtagagtccgcaaaggagatgctttccagcttgaagctgaggcaagagataattttgatttttctgtaaatattctggttcttgggaaagcaggtgtgggcaagagtgctacgatcaattcaatttttggtgagacgaagaccagcattaatgcttgtggtcctgctactactgctgtgaccgaaattgttggggtggttgatggagtgaagataaggatttttgacacaccaggcctcaagtcctctgcatttgaacaaaatttcaatacaaaagtctgtccgcggtgaagaaattgactaaaaaatctccccctgatattgtgctctatgtggatcgcctggacctgcaaactagagatatgaatgatctgccaatgttaagacaattaccagtgcctgggttcatcaatatggcgaaatgtcatagtcactctgtcccatgctgcctctgctcctccagacgggccatctggtgccccattgagttatgatgtatttgttgctcaaagatctcatatagttcaacaaaccattggacaagctgttggggacctacgacttatgaatccgagcttaatgaatccagtttctcttgttgaaaaccatccttcttgtcggaaaaatagagatggccagaaggtgcttcctaatggtcaaacttggaggcctctcttgttgctcttatgctactcaatgaagattctttctgaagccagtaacgtttcaaaaactcaagaatcaccatttgaccagcgcaggctgtttggttttcgtcctcgctccccaccacttccatacttgttgtcttggttactgcagacacgtacctacccaaaactccctgctgatcaaggtggggctgacaatggtgattctgatattgaaatggctgatttatctgattctgatctagatgaagatgaggatgagtatgaccagctcccaccatttaagcctatgaagaaatctcaggttgctaagcttactaaagagcagcagaaagcatattttgaggagtacgattatcgggtgaaacttctacagaaaaacaatggagagaggagttgagaaggatgagagagatgaagaaaaaaggtaacactaaagaaaatgactatggttacatggaagaagatgatcaagataatggaagtccagcagcagtgccagtaccattgcctgatatggccctgccaccatcctttgacagtgacaatccagcttatagataccgtttcttagagccaacttctcagctcctcacaaggccagtcttagacaaccatgggtgggatcatgattgtggttatgatggtgtaaacattgaacagagtctagccatcatcaataaattcccagcagctgttactgttcaggtaacaaaggataagaaagacttcagcatccacttggattcctcagttgctgcaaaacttggagagaatggatctgccatggcaggctttgacattcaaaacattggaaagcagctagcttacattgttagaggagagaccaaattaaaaaatttcaaaagaaataaaacttctgctggtgtgtctgtgacatttttgggtgaaaatgtgtctactgggctgaaagttgaggatcagattgctgtggggaaacgcttggtattagtaggtagcacaggggttgtgaagtctcaaactgattctgcttatggtgccaatgttgaagtgcggcttagagaggcagattttccaattggccaggaccagtcttcactgagcctttctcttgtgaagtggagaggagacctggctttgggggctaatcttcagtcccaattttctgttggacgaggttataaggtggctgttcgggctggattgaacaacaagctcagtggacagatcactgtgagaacaagtagctcagaccagcttcagattgcccttattgctattcttccgattgccaaggctatctacaaaaacttctggcctggggctagtgagaattattctatctactagattgtgtcttttgtttgcgttgctagcaaggaaagtagactacgagtttatcatatcatgttgcttcttttcgtgactgtcttaaataatgagttttttttttttttttttttttttttttttagtttcgtctagactattgaatctcctgctatatagtgcttttatgtgcctgaaaattgtactgcaattgagatggaacctaaaaggaattgattcataaattttgttagcatctatttgaataatgttgatgtcagattatgctgttattctgatttctttgctctataacttctgtttgttggttatacattgaaacctgattgctgagcaattcctgaatatgataatgtgcctagtttgattggcccagaagtggtttgcaactcgtggtatctttatatatactattggctaaaggctttcttttttctcccattttatttctttcttttcctttgttttttttcctaatctccagcatgttgtgcattcttagagaaataattaacaatgcttgtctattgacatttattgagcatgatttagcttttcaagttctgcaaatggactgaaatgcaatgtgaggtttttgatgtcctttacggaagataattttattcgagttaaggtaagatcattaatggatgacaaagcctaacgtattacattatggagaatatgatcgaatcacataatgtcagaattattaattaataccatttttcccattaagatgaacattacgaacttgacatcatagaataagactcaaatcgataggaaggtttgggcctgcccatgtcatttatgctgagctaaatctagttcgtcgaggaaacgaggttgtaatgcttctttttattaactttctctttttatttgtgtacctagttgtgtttttggtgaaataaatttaaaaaatatcttatttcctaagattaaggtctggagtttattttggtacgagtaaatgttccaacagaaaccactctagatataattttatgtttaattgagttattgataggtaatttgttgaatgagaggttttagtcctatgatttcatttgttcaaatcaaatctccatacctttataattaattaaatctaatttaatatttaatttataatcaatttttaatgacgtgctaaagattatgtgagttgacatagtgatgtgacatttaaaaatgggatttgaaatatgcaaaaattgttttatccttgtttggttagaaaaaagaggtttttttttccaaaaattaatgagtttaacatcttcatttctttattttaatttaaatatttttctttctttattttcttttacacgatcaaactcacccttaaggttagatttgaactcactatcctttaacccacacatgagaagtattaaagacgaagaaatggataaacaaattattctttgctgtcattactaaccatattcgtcaattatttgctaaccatgagggacctcaaagttcaaaagggaactgctggcatctttttgttgcaagtatctgattgtcttactgttacaaaaaactgcgtggtttttgttttcttatttaccagaagttgttggatcaaagaaaacttcttagtcatccttgttatttgcccttgtccacctatgaatatgattctattcttatcattaataatgctgctaaaaggttacatgacatattcaacatatatatatatatatattatatatatatatatatatattctttcatcatttaattacacggaaaaacagtcaaatcattatagacttacactaagcactctaatcatagcccataacattcactacctttcagaaaataaagaagcccatagcatttaggatttaagtagagctcctttaaattgtggtataatataatataatgtaacaaaagaggcacatcatatatgaattataactaattaatcaataaagcatttccctatcatggaaatcagcacttctacaatcagcctacttgtgtttttcttttatcactcttctaaacaaaagatatagtataacaaaatttggaaattgacggagtcaaattttgtaacaattaccaaaagtgagtaccgataaatcatgtttgggaatcttattcagaaatacaatagtaatgcttttgacttcaacaacttcttaattattgcgacccagaatttgaattaccaagaacatgaaaagtttagattcataaccttttgttcacatatgaattgatactgatcgtggaatgaaccttacttacgttacctgctcaccattcttcaaatagcatcaatttattctgatgattcactattataagcgcattccaaattctgaagattatgaataattgtcttggcggcttgacttgattccagcaataattgagtagtataattatatataaaaaatacatttcagtccagaggacttgcatgatttcaatcctaagttttttttgtagacattctagttaaattatggatgatattatcaagctagtgtgtttaatattcattattcttaatcccaaacattaaatccacaaatttgaagtaaatgaatttcttattgagtatagaaatgtgtcaagtcaaattctatacccatatctatctccatgaggccttaatttcagggagttttcaacatagtcaacacccagagtaaaactattccaaacaaacatcgaactttaggcgctctgtgttgcactaccaacatcactataagacatacacatttaatatgtctagtcagaaatatggccaccaaattaatcaattttaagatacaagtctaagatcaagttgaatgaaaatagagggattctaaaacacattttacctaaaaatacaattaaatacaataaaattatctgaagaccacttttttatgtgaaaatcaattggctaagttaattttattataattattaaaaatgtaagtagttattataacagttaaattatttaattataatattaatacaattaacttggccaattggatttccaaaaaaaatatggttagttaagtagagaaatttattatttattattaaattttgggtgatatgtatttttagtcaattttatctagtatcttaaaattaatgaatttaattctcacatttttaaataactttttgatgtaacatgatagctatattatcgtaacaatcattgataacatttattgtagccacgccaataaataaatttaatgacattataagtgaaagttaattccacaagtttttagaaatgcaaggatcacttttattaattttgaaatacaaagagtatgatcaaatctgattaaaaataaaggacttaaatatatttattttttaataataaatgactaaattaaccaactattggaatgaatttgtccatctcaacataatattttttattttcatttttcctcgctaaagctcctcacatgagcttcccttcttccttctcctctctctctcctctctctctctcttatattcacgtgagcttcctttatgacccacccttggaaaatatataaataaatataggcaaatattaaagagttcttgcgatattgattaaaaatttaaaaaaatatttttattaaaatatgtaaaattatattatttatgatttcttttacactttcttacaatttctacaataaatgttttttattttattttttaattaatatcctaaaaatactgattagtaatacccataaatataaaagaatgaatcaatttatgcatgttgaattgatgatacaagacagccaagttgggaatttaattattaatcgatattatgtagggtaaataaacacatcggagtatacttgccatttaaattcacagtattttgttaaataccacaactaaccatgacaataataaatgatatcttgttacaattaattgcagaacattacataaacaacctatatataatcgatttttcagactcaaaactgtcgacatgccctttcacacttctttccatctttatatttccttccaattaagtatctcatcataggctttccaatccaagcttctaatataggtgcaatgtcacacaaaaagagagtaaaaaactctatccaatttctatgtatatcaacctagcttacatatttcttgtcgtgcatggatccctttgcgacacctcaagaacaagagtaagattcaggaaaggtgtaaaatgaaagtaaagacattctagagtgagaaagttggtgggaggggtcttgtaaagaaaatagaccatcactcatcacccaaaagtctaggacactcttttggtgcatgtcaagaaatagatcatcacccatcgtccaccaaggaacaaaaaagccttaggtccccccttgggacttgaaggggatctctaccttaatttatatttgtttttctattaagaaattaatgtattatatatcaaaaggagatttcagtggacccaacacaacccattggcctaaaactcctcctcttcaagaagttatggcacaaattgatttatccagaaggatgcaatcatgcaaagctatgcgtctatttaattacagattattacataagataattttattgatttttatataataattattcttaaaattatatttattactataatttttatttacagtgtactttttttttatcttgtcctattattctcttttgatatgaaacatgtaaacttttattgtggtccaaagtcagcaaatgagaaataaagttgagggaggagatcttccaacccatacaatgcttacatttcattcaggccaggcatccctcactcaattacgtacgtaacgtgggagtatatttcgtacgaattttcaaacaaagatgttgctagtatttcgtacgaatttgttaataccaaaatgtcacaaccaatcatgatgtgtataaatcacacgtatagatgagttaaaatgaaaaagaaattacctgtcaaattgtatgaatttaatttgtactcttttgtctagtttgttttcgtattctttatcattttccaatttcaaatcctcgtaatgccgtaatgggccaagtaaaaaggtattcattgcaatttgccttattatggatttgttttctagagaaagtaccaaaagtaaattgcattacgtgcatcgcccatttttttttttaaattatgattggatttgattgtttaaagaaaggaagacttctagttttctgctcaatgttttaattataaatcgttttaaatgttaaataaataattttaaacgttaaataaataagtagtataataattacaaggctaaattactaatttaatctctctatttatttaattactttaacttgggctatctattattaaaattgtaatttgttccttaaatttcaaaattgatgcaatgttctccattctgcaatattttttttaaagattgttatttttatgcatcagaaaattgtaacttatgtttttttatcaacttttttctttttaacttcataatagtattttttatgtaaaagttaaaaaaattattgcataaaaacaaaattaattatcttaaaatcacttttaagcaaatttatgcaaacaaaagttggtgtaattataatcgattatttaaataatctaaatttttataattattcgagacgtacccctttctcaattataccattaatcaaggaaataattttattaaaacgcgttcttttatattttttaaagacattatcatatgatttttaataaaatctttcctcttttaattatttaaccaaatatccttagaatacttgttagcaagactctaaatgaaaaatggtaaaaaaaaaaaaacttaataactaatattttatataaaaacaaaaaagattacatttgttgatttcataaaaaaaacctttaaatgacatttgtaaaagaacaaagatagtaaaaaatagagtaactaatttaacatttatatatcattaacggatactataaaagtggttgtaggattagaattcaagaccatcaagttagaattactgtgtgtttggataccaagcataaacaatctcaactccaaaaaccatagtgaaaacttgaacagttaaaagtaacaaaaaagagttgttttgttgtgattgtaaaaaataattgaggtgcgataaacacaccgtatactcaaacacgcattcaattgattcacatactcaagtgattaaaaggaagactaaaagcaaaatgtaaattcttaaacttagtcctactaatcaatatggttttgacattacaaaaaaactgtactagtatttatttgaatacatttgttgtggcagatgtacgtgcaattaggttattcccttaaccgcgagatgctgtttttaggtcaaagttagcaacctgcaacctttacaccctacaccacactctgcaacaaccagcacaccaaacgcttgtccatatcttcctgtctgctatctcccttcaagcctaacgtaccatgtctacatccccatctctctctcatctatggacatgcatcacatgccccccactcatgcatgcatcacaacccatcaacatttaatttcaaaccatttctcatgaaatgaaatggttttatcccacggattaaccctatacccaaattgttaccaccacctttttttttttttttctttttcttttaaattcacatgttgaattaactactttgcacctaacgttttgaaataacgaattagctaatttgtaccaagcgttgctttaattgatccacagacaaaatgtacttcaccaatatctttgtcttgctcaaagaggagatagattattaattaagcatttttttaagccaaaaggcttcctcattaaatagatgcgtcatatactattttttcctctctaattctgttttaattttattacaaaagtaatacagaataaatagtaataaataatcatcaagagggaggaaaacccctatcatctttaaatataatttggaaatcataatttaacttaataaaattgatttctttataaagaatctaactcagttaactaaatataaaattagtatttttattcttacaaataaaaaatatttataatttatcagaaattattagtatctcaatatcttgttattactttttacaagagcatctgagtaaatttttggctattatttttacaagactccttctatatttctattactttaattgttttatttcaaggtcaggttttacttttggtagtagttcttgatatattctaggaaaggttttaggattctggaagttttctataaatattttagaaaaagaaaataaaagaagaaaaataaaatgatttttttataagttaaaatgagtttttattactactttgtaaatgtatccatcttttgaaaagctatattggtaaacttttaaaaattagctaataaaaattatttttacttatgaaaagttcatctcatttttttttcatattttcttttttaaaatgttttaagaagtttatccaaacatatccccctatttcttttcactttatgtgttaatttggttgctttacttaatttataatgatcaaatataaggattggaatattctttgtataacaatggaattgattaagtggaagtagttattatatcacaatttagtgaaccgatgtttaaattctcaattgaggagtatttatgtttgtattccattatgtcttgaatatgattacattcaaaggaggaaatttggaaaaagaaaacattctttgtagtttcaatgtagtagtatttgctaaaaaaaacttaaagtaaattacacatgctcctttgagatttaaggattatgcatgtctttattttctttaaaaatatacgtgtcttatgagatttaaaaaaattatatatgtcctcgagatttaaggaacttacatgttttaaaaacctatacgaagtcatgtgcgttgacaatttgattaaaagaaggttaaaatatgtttttattttcataaatatgaaaatttcagaatttgtagttgcaaattttttgtctattttcgtccttgcaaaaatttagatatgatattctttttccaaagctaattcagatacattgacctatgtatatgttgttatagaaagtgtcatgttttaacttttctacatcgattatatgatctgaagctatatctgaacctacatataagttatagaaagtatcaattttttaactttttacaataatatacatataagtgacataaaaaagttgaaaatctatagtttctccgataacatatgtgtagctttgaatgtatttaattaattcatgtcaaaaagtaataaatttaaattttgtgagaacgaaaaatagataattttttataacaattttaaatatttttatattatagaacgaaaaaatattttaatctttttaataaaaattgtaacacatatgattttactatttagacgatatttaaagatttgtagtttaaaaagaataaaaatatgtaatttttaaataagatgatttagtaatttttaaaaaagaataaaaactttagtttaaaagctcgaaactgataaaatgcaaaggagaacaatcgtgtactgtttttcaaaagaaatttcgataagtaaaaaagacaaatgatgatattaaaaaaagactgataattttttatttatcaaaataaatgaaaccaaaccatataaaaatttcaccgatgtaaattaccaaattacaattaaaacgtgtaatcattagttaaaaaaacgtatatttttggttctgctgtgcttttgttggcagcgcctaaaagtaagctccatgtcctttcatttgatattctctctctttgataagaaaaaagataaataattatttttattaataaatgtataaaatattgataaattcatttcaaaaaaattaaatttaattttaatcatcaaaatgaaaaatacaacaaattcatttattagttaattttatctttatcattaataaaatagtctatgtgatataaagagatgaaaatatcataaaaatgattgtcaacctgattgtgattaaatcaaaaattggtaaacttttattaaattattctgtcatattcaaaatttgtaaaatataatttaatctcattttttatcattataagtataatattataataaatacttaaaaaaataaaaaaaatataagttataataaatataatattaattaatatacactaataattttggtaaacttataaaaaatgagaaattaagttaattgttataaaaaatgagacccaccttacatttattaattaatattatatttattattattttttctattttttaaatatttatgataatgttatatttataatgataaaaaaaaaaaataaagattaaattatattttattcttaatgaaacgaaatttaaaatctgatcaattagtctaatgaaaatttaatgacatttttagtctaatatattcaacacccaaattataattatttttatgatatttttttggtgttatataattctttcattaatattaataatcaaacttaatgaatgaataaattatcatatttttttattttcaaaattaaatttttattttttggaaatgaatctgtgaattctctcatatattttggcatcacacaatatcatataaagagatcgagacaagggttttgcaaaaaaaaaaatccaagtaaatttaaggagccaccactgttccaaccagccctttcattttacagtgcctgtttgttttttcgtgtttgcattcactgttctacagaagcaaaaaagagtgctttgttccatctctttctgtgggtgtgtctcgagattggtgtgtatgctcaagataaagctcactcactcagtcacagcagcaacaaccctttttccttaactcttgaaactgtgttcaaagtttggattttgagagagcatgatctgatgaaggaatgtggaggctctcttgggggagagggcaaggaagaagaggactactgaaaacaagtgttgcctttttgaaccccaaaaaatacgtttttttttttggttttgttgttatggcactttgtatgcagagtcagcagagagattcagcatcaaacaagcagctcatggattgtggcaagtatgtgaggtacacacctgaacaggtggaggctttggagagggtgtatgttgaatgtccaaagcctagttcttccagaaggcaacaaatcattagggagtgtccactacttgctaacattgaaacaaagcagatcaaagtgtggttccagaatcgcaggtagggaagaagagaaccaaaacatgcatatcattgtttggtttcaaccttgccacatcataaaaaaaactatttttgtcatgttttgtgttgtgtgtgtgtcctatggttgaggatgctcaagggtgtttctgagcttctttctctttgtaaagttgagttttttggtttagtatatttgttattcagtgtttttttttttgcctttttttccttttcaaaaatggaatgtcataaagtgatgtttcattatttgcattttttttaaatgtgttatttgggttcaattttagagaaaaagagtaagtcatccctcttgaaaggaagatctactgggaaagttacttaatttttgtcattttccttgtggttatccaactagttaagatcgatcgtttttatttatttatttccctcgaaaaggagtttcttttctggagttgattaaatgggagataatgacagctgactgttcatttttgttgatgagttttttactgctttcttctgaccttcatcatttttgttttagaccattttctgatgtttctgtgtaagatgctttaacagaaatgttcatatgatcatttggcttttgttttgggttggtcatagataagaggaaggataataacagctgattttaacgacttctcccactagattaatcagttttcaactttagcttctttttttctttcatttttcctctttaaagattttttttttcaggtctctaatattttctctttttgaattacggaagagaggagattatgttttgttctacactctaaacttttctcgaactaatttttcaccttgtccctgcattagtatttttttattaaatcaacatgcatatatcatgtttccaaccttttatctgcaattctgcattgactgattaaaacaagttttagtcttggtccgatagtaggtatctgaatttagtatgtaattcttgttaaggatattcacatgtataatattcttggtctgatagtgtaagggacttgtccaatagtaaagtgggaaacttcaaagagtgaaatgaataatgaatgattatcatacaatgttatggtaaattgtatgggaaagatgacctactctacctgccttacactctgccaattttcttctgtagatgtcgtgaaaagcagcggaaggaagcctctcgtctgcagacagtgaatagaaagctgtctgcaatgaacaagttgttaatggaagagaatgaccgactgcagaagcaggtctcacagttggtttatgataatggattcatgaaacaacaaatacatactgtgagtaactttatctttgagtgattgctcttctcaattatcattctgaatgttcattggtgtaccattctatctatatacaagtatatgtgtagtgtactattttattgttattgaagaatctcatttactggtttcttaacaggcatctgctactactactactactgagaatagctgtgagtctgtggtagtgagtggtcaacaccaacagcaaaaccccaaaactcagcatccccagtgggatgccaacaacccagctgggtaagtaacttcataatgcaaacaaatttgtttaattaatatatactccttcaccatcgtcacgagtctccaattctttattctgccagtcttcttgcaattgctcaggagaccctggcggagttcctttccaaagctactggaactgctgtcaactgggtccagatgattgggatgaaggtatgacttattcaaaaactcttcttcatggtcattgctgcataaatgtattggtataattatattttgcctcattttttctgtcttaatgtagcctggtccggattctattggaattgttgctgtttcccgcaactgtagtggggtagcggcaagagcctgtggccttgtgagcctagagcccacaaaggtattatgctgtaatgaagcttattcattgcagaattattttctttgctgaacaatgaaaccttgttttattgaactaattgctttccacatcatctcaggttgccgagattctcaaagatcgtccatcatggtatcgtgactgtcgatgcctcaatgtattgagtgtagtccccacagggaatgggggcacaatagagcttatgtacatgcaggtctactgattattttatgcaaaaaaagaagttgaactgttgtttaaattacttttaaattattcctctgttgtttttcttgatatttaaatttgatttttttccagacatatgcaccaacaacattggcagctgcaagagacttctggactctcagatacactactagtttggaagatggggtcttgtggtactgagtggaatcttgattgttgtgtttttcttgatttactgtggcttctttcctaggaagagtttgtctcaaagaatgactattatttttttggccttgcagatttgtgagaggtccttgacttcttcaactggtggccccacagggccagctgtttcaaacttcatacgagctgaaatgcttcccagtggctatctaattagatcctgtgagggtggtggatctattattcacattgttgatcatgttgatttagatgtaaggaagattatgctattcaaatcattttttaaatttccatatatttgaacttcttcttcctacttatataactttgtttttgatgtaggttttgagtgttcctgaagtactgagacccctctacgaatcaccaaaattcttggctcagaaattgactactgctgtgagatttcttctaacactgcattatatgtttcacatgacaaaagctgttgatttaaatttcaaatattattgtgcaggccttgcgacatgcaagacaaattgcacaggaatcaagtggagaagttcaatatggtgggggtcgtcagcctgctgtcttgaggacatttagtcaaaggctttgcaagtaaggcccttccatatttggtggttgcatagttgggcatttgattaatcactttgtcttcatcaatccttactgaccaataattttttaaaatttgatttagagggttcaatgatgctgtcaacgggtttgtggatgatggttggtcactgatgggtaatgatggggtggaagatgtgaccatagccataaactcatctccaaacaagtttttcggttcccattacaatacatcaatgcttccagcatttggaggtggggtactgtgtgccaaggcatcgatgctgctacaggtacttctcagaccaatctatgaggaaattatcattgttctctaaattaactctagtatagtagcagcaatcaattccaagaactcttgctccttgttcccccatgtcccaacctgctagaatcttctggatttttgtagtgtttatcttcattatactcaattataaaacggtgttctgcagaatgttcctcctgctttgcttgttcgttttctgagggagcatcgttcagagtgggctaattatggggttgatgcatactcttctgcatgtctcaaagctagtccttatgcagttccttgtgcaagacctagtggtttcccaagcagccacgtcattataccacttgctcatactattgagcatgaggaggtattaatcattttcagggaatgattgatgaacttcattttataattttatttatttatatggtcattttccacccactacaatgatgcagttcttggaggtagttcgtattgagggtaatgcatttccccctgatgatgtagctttggcatgtgatatgtatctaatgcaggtaaatcatttttgtgtttgggttgtttgtctgcttatcttatttaagcaggaacttgatgttactgtgaatgatttttatgtaccttattatgcaatttgatgtggcagctgtgcagtggaatcgatgaaaatgcaattggagcgtgtgcacagcttgtgtttgcacctatcgatgaatcatttgcagatgatgctctcttactgccttctggtttccgcataataccattggatcctaaaacagttagtgacatttctcagtagcttgatagttttaagggaattggtcatgaagttattttgttaggttttttaatgtttaattgccatttcactacttcattttatctttagtttgagggtctaaaattagcatgaaccatcaggtgaattcataattgtcatatcttggtgcttcttttatacaatttatatctagactgtgattggccgactaaatttatctatcttgaagtcttagttcacatttgtttcaatgaagtaatttgggcttttagcaaaaccaagcctttcttacagatgctatgctactacatttgagcatgcattgactaacaagatttcttttttctgtatgttttgctttcaggatggtctggcttcaactaagacattggacttagcgtcaacactggaaacaggatctggtaatgcccgctcagctggtgaaagtgattgaataactacaaccttaggtcggtcctcacaattgcatttcaatttacctttgagaaccatttgctggacaatgtggctgttatggctcgccagtatgtgcgtaatgttgtgcgatctgttcagagggttgccatggcaattgctccctcaaggctcagtacacagttggggccaaagtcacttcctggtccaccagaggctcttaccttagcaagatggatctgcagaagctacaggtttacaatcttccattaatcttgtctgtaagtctatttttgtaatgattaatgtattttcctaaattatttgatatccttgtcttgagttgtcttcaaggttagttaaagtacctatagaaacttaccttgtatttgttaacttggttattcaccttgtatttgtaatttttagctgtgtcctgtaattgtctgaaaaaggctcagtttcagatacaaattgcacaaatttcaccatcttatttcttgtgtctggtatgatatagtaaagattgttttttcaggctccacacctgcacagagcttttcagcattgagtccacatctggtgatgcaatcttgaaaaaactttggcaccatccagatgcaatattgtgctgttctgtaaaaacaaatgtaaatcattgctgcatctatataatcctaatctgcctcaatttttatttttttccagaagtttcttgtttttagtccaataaactcagcaagtaagacatttgagtgccaaaattatgcaggcatctccagtgttcacctttgcaaaccaagctggacttgacatgcttgaaacactcttgttgctcttcaagacataatgctggataaagttcttgatgaagctggcaggaaggttctctgcattgagttctccaagataatgctacaggtgattcacttgtaaactaacaatgtctagtctttttagggtgtactttttttttattggcaaatgttagttgtagaatgttagttttgttagctgagggggatcaagttttgacattttctccattcccttctcccttaaccaattcaccttatatcccttttagtgtgtacttgtaagaattgtttacatctttttcaagtcttgactataattagtgctcttatcttatttgtcctttttcatatcagggatttgcatatctgccagcaggaatatgtgtatcaagtatgaatcgaccagtgtcttttgagcaggccattgcatggaaagttctggatgatgatgattccaatcactgccttgccttcgtgttcatgaactggtcttttgtctgatggggggaaccatcatttagatactttattatatctattaatttatattgagtactttactaagatattgtcacatcaacatcgaatgtaactaatgtctggatttcgtgaactcatggttgtgtgtgccattagattagctttgctctatgcttttaccaaggatgtacctttcttactatataaactccttgttgaagtatagcctacttattcgcaaaaattatcctttagtggcagtttagtttttatatttatttatgtgaactcagtcttttaatttataaatctcacatatatctttttggttttaattgaactctgcggcattgtgatttatgtagaccttcctagaataaggttttttattgtcttgatatctttgtagatattagagtgagatgcaaaagtaggattcttttcgttttaaaataagtcagatttagattgtgttacttatattaaaaaaaaagttaataaataaataaaagtgataattttacaaaattagttttagtattaatattacattgaaagactatagggatatttattgggaatattagtaaaaaaagtaattaatatcatgttaaaaagttaaatatgaatttactttggataatttttttctcaatgtgatgcttaatttggtaaattcatgaattaaatgcgaatgtcggacttgaatttgtcaaaatactgcctaaaatatgaaattacagaaggtatatcatggattgatgcttaacaagcttgatttgtaggtgtaatgtgttgaattagggtttttctttgcaccttattttagaggcgttttgattttgacaacagatccagcaggattgcattgttattgttcccggaacatgtcatgattgtgttttacttgtttgttgaaggaagcgtgtcttgatttcgacagaatcaatataatgagtgagatcttagaaggaatgttttatgaccaaatttctacctatttatcgtttgtatttctatttatggtcgaggaaattcaactttctgtctgtcacaattctttcttttcaaacaagtaatgtgaaattctgaactcctcgcagtgggttttgatgttaaacttaagattcaagtagtgcctcttccttctagagaatttaaaactaagatatatttttcttatttaaaatattacattttttaaagagactattttatatgattgagtgtgttaacaacagtgaattatgattgaatcaatataaataccacttaccagtaaccaaatagatttatttatttatacttgaccagaaaaaactatgacacaaaaattagcagtttattgatcactaatttgattaaaaatgtttgtgatgtgaagcagatttacaagtgacaatatgaatttcctagaaaagtagaaaaataagaattgtatccgaatctagccatgtaacaggtatttgtattgtacctgtgctataatatgcatctggagcagcttgaaattttgtctcagttacatatttgccataatggattctctttgagagagcctgcagtcacaagaaaacaaaagttttcatcaatgtaacagccaaaatttatgattacaatctctacttactaagagaaatttctgaagttttcaaaataaagcaagctaaatgttgactaaggaaactcgcaagttacaataatctctctatggaaaccaagcactttcatgcagaactttgcacgaggcctgatcctgttttgggagtcaccacatagtacagagtttaccttcttaggaaaaaatttccactaatatgatcctgttataataagatcactttttttgttctggcgtgaaaatgattgtttcaaaaatatcaaaccaattggtcttgacattgcacatgtaaaaagttaagttaaataccaaaatagaaataaaaaaggatatgaaatgatggtatagaatatagatagatacgtatataattgataataatactatgctttttaatatgaagtaaattaaataattcaaaaaaaaaaaaaaaaaaaaaaaaaaaaaaaaaaaaaaaaaaaataaataaattaaataattaaaacacaaggtggtacaacccctggacatcatttcaatatagaaatgaatttaactaaaaggcaactaatgtgtaccagcaagcatattaagtttacaacaaaacaacatggaatcagagttaacatcatctcccttctggctattagtcggataggaactctgaggtgaaacctccatactttatcattatattaattgaatcagcaatagggtgcaacacctattcatacacgacaaagaaattcagtatagatgcaattagcacataaaagatgaaccaacaaattcattaaatatgtagcacacacagacatttgctagatttttagcaacaatagtaaataattatttcatgtcacctgactaaatagatagcaatgaaacaaacacatgctgaactctgaatcaaaccatgcctaagctggaagatgacaattaacatgaacaacattaatattgtaaaccaataattcacacaataaaattacccatgataaagcaaagtcgaatgaaaaattgttaggccagccaattgatctcctaatattatcaagggattttatgcttatctgtttttgttattaattagacttgtctgattgttattaatttgaatttatttgctttgaattgatgataacatatcaagttgttatatacacctccaaagcaatagaaaggctgagtcattatcattcaattatgagtaatgatagacgcacaacaatttcttcaataaattgtacaacgaatgtcatgtcagccaaaaaaatcaaattttaattttaattaatgaaaaaaaaaaccatcggagaaattatatgggaccaccaaggcaactatggttctattaagtaattttgtgatacatggacaaataagatacaacaaacagaaaggtaacagtgttatcttttaacagaataatatcaaatttaaatcttccttaattaaattaacccaaatcttttacaaatcacatttatgattgatatcaaattcaaaactttcaaaagtaatactactctatcatcaagtatgtctatcttctcccacgttttgaaaatcataaagttctgtcattgttataccgtgaaacaaccacgaaagctctgccatggtttatgcatggttgcttcccagaacaacaatgatagaggtggagataagagagaccataaaacatgaaaatctgattatttgtttttggtataaaaaatgtaattagtattgaacagtgatttttttttgttaatggaaacttaattatcttttttgtttgttattaaaattaaaatttgatttttttggctgatgtaacatttgttttacaatctgttgtaaaaaaaattttcgtctatcatttctcttcaattatctactacaaaaatgtttaattaatttaaatggactaaaaaacagtacaaagggacattgataataaattattatttgcgtacacatccttactcttattatatagtcaagactgtcaagttctgaccatatccattgtactccgatgcctccaaatttcatcattttaccttattttaataattacacagagcattggtcataccgattttgtactaaagtttacacacgactagaatagagacagttaggtaatgccaatgtcacactcatcactcatgctttgtctgtttaggaactttttttttatttagatggtgaaaattggtttattttttttaatcattaaatgtgtgtttggattatcgttgatagaattgatgttagatcaacttggttttaaattaacatgattttatataattaattttgaagtaacttaattttgtttggataacatatattaaaaaattgatttttcaaaaaattaatgtttgaatagtttgagtcataattgattttaagtgtcaaattattaaaatagactttaatgtctttgaatatttatttgttattataatttgctgtttatatatatatatatatataaacaaattaaaattaaatagatatataactgacctttgagctactactcttaccattttttaagaaaatgatttttttatatttttttatatatattattaactgacctttgagttaagagagtccagtatagtatctgtaacacagcacaagattccagcacaatgttcgtactatcgttcaatgcagatcctatgaactatgaagtgaagatggtaataatctttctttaattgagagaacaagtaaatataataataaattttcaactaccaaaataaatgaaggtccaaggaaatataataaatgcaaataaaaaataaagaatgtacttgttcaattattaagtatagcatttgcaaaaagtataaaaagtacaaggattttattgtggggaatatatacataatgatattttatattttcttgaatcaaaatcactgtaatttattgtggttacatccccaaaccaaacatgctctaaatgattgctaaaacccaaccttcctcatgttcttagatggcatgtctcaattttttttttaccttaatgactcttttcttctgaataatatcaaaaataaataaaatagcagcatgtgaaaaacattttgtcatgttttaaacatttaaaaaattatatgtaaataaaaaaaatatttcatgtattaataaatcacgtgtattatattaaaatttatttatttattaaaatataatttataaaatatttcaatgtaattttttttcaaaattcataagatattctagaaaattattaatattgttttttccattttggtaacatttatgaaataataatacgtattttagacattaaatacaaattatcaatatatggctaacataactttagaaaaataaattagtattaataatataaaatattttttatattattaattaatcataaattatcatataaaatatatattattataataaatatcttaaaaattatactatcattaattttaattgattaagtaaaattattttaattattgatggatgtgattaaattctaatttttaataggataactctactgtcattgtagtaaaactttttttatttgttttcttactaataacattctaaaaacttagacccgttagtttattcagtgaatggacaaatgttttcaaacaatataaaaggtcttatttatttttatgttccacaaagcccattttcaccctatggccataaacactttctcacaccacaatgcagcacttgcgttaactgccagaaatagttaattaaatttttaatacaggaagatcttgcactggaagtgggccccactggatcttcagcgcatttaaagctagtataacattagcatccatcccatgtatgtatacgtatgaatgtttatgtatatgtcctaaacatatcatgcatcattcgatattatcatgcatgatgaattgatcacatgtcactacttttttgtgtctgtgttttcttttatttttccgaaatttggattgtccccggttaagtaaaaggacccttaattttttttttataagataacaatgatacatgaatttaaatcattttaattacaaatacaaattacaaacaattacatttaaattatttttatttgaaatattgttttcactttgttattttttattaatgctaaggctaaagttaaggaacaaatttatcaccgcattaatttcaaaacaggtaaataaatagactaacttttcaactttacaaaatcaaatattaagtatatgaatcaactcatataatattattttaatttaattaaaagttcgaattcaaattttaatacgcaacacttaagaagaattttattatacataataattttatctaattcgataaaaaaataaaaaaaaaaactccacaactcggtctccattccattttaacaagttggatccctttatttttcctctctcttatggtgcctctttatgatcgtcccaaaagtaaacacgtagatcttattagcatcaatgtgtggggaaaaagagagattcaaaataagcacaattttgcatgcagtgtttaatatggcttctgagcatgtaaaagttggaaagatatactgtagctctcaaaatccaaggaaagtgcgtatctaaattcctagctcttgtaatgtcacgttagggagtgagattccagatgcaaaaaagaaacacacatcgttgtcttgcagccttgcaggtttaaaagactaatcaaaacaacaaattaaagcactggagaagaagaaatcaaatactagtggggtaggaggatatttgtgttctgttctgtcatcatctgtgaacttttcactgttttaaacatttccttgaactcaactgggtattaatttctacctcttttgcttcaaatatgtaatatggtacataataatcttttggttctcttaattatgtaacaaccggctcgttcggtgtgtgtgtgtgtctgaataggactttttggattgttttgtttgtttcggttctagagttaataattattgttgttttattgtttttgggattttgtgttgggtcacggctactcaccctgtgaactttgggttaataacttttcttttgtcataacgacaatgaccttaagatttaagaatgctataaaacataacttattacagtagatcattttgcaattagggtttctttggtttaatttgtgatttaaccactctttgaagatcttttaactgaaaatcaaacatacacttaatctcttaaagtaggattattaattttattatgtactacctctagacttaaaatccatgtatacatatatatatatatatataatatatatatatatatatatatatatatatatatatatataaaagacaaaactaaagaacagaaggcagcccataaatttctggactagtcatgataagtgagaaaacttatagtatatatagtagataaataggtcagaaagggtggctcatgcggaatgaccgaatgatgttaatattaagcactttcatattgtccatatttagataaactccttgctaaacatttataagtaaagaaaaaaaaacttaaaggaaattgctaacatactttcacttttttcaattggaataggttaacaataccaaaagttttggacaaaaaattagttttttgttttaataaatttctttaggaatattaaagtcatttagtatttattttatttataaaaaaaaaaactctttctctctctcatctgtcatatctctcatcgatctgttaccttacctctttgcatttcaccaaaaaatttcagacttcaacatttcgttaactctcaagagtttggttctaaaggtgacaggaacaccatcatcgactttgggggcacctttccgttcattcaatccgttaagtatttggttgcccaagaatttgagaacctgttggccaattacaatagaaccaaaaaaaaaaaaatagaatgaatgttaaatgactttaatatcccttaagtaatttattaaaacaaaaaaaatactttttttttccaaattttttggtgtagataacctactccaactgaaaaagtgtgagtattagtaattctcaaatttaaaatgtccatatacttattcaaaagcaaatttagaaacagtttttaagcattttcaatagactcttgttatttacaccctcatactccctttctacctcttaactattcatcatattatttttcttaaagaattacacattttttatttttggaaatgtatttctaaaattacatataccattttgaaaatgtatcttcggaattataattcataatatcaagatatactttgaaatatgtatatatttttaataaatatcacttaagaattaagatgattgatgagaaataaaaaaaatgattaatatttatcttatatccatatttgttagttttattttcattctatcattagttatctttaaatcttatctaaaatcttatttttcatcttatctttattatcctttaaattctaattttaaattatcttcactatatattcattatataataatgcgttttcatcattactatacaatattttgtatttttcttcatgtaaaaagcatttcaaggaaagttcatcactaacttcatgtgggactgaatcattgatatagacttgaattaaatgaatgcacttaaaggaaataaactattgtcaaaagctttgctttgtaattaaggtgtataaaatataaagttaatgatgattgtaccttgaaacatagtgccacatgaagaaaaatacaaaatattgtataatgatgatgaaaacccagtattatataataaatatatggtcaagatagtttagaattagggtttcaagaataataaagataagatgaaaataagattttagataggatttgaagagtactgatgataggatgaaaataatactaacaaatatggatataagataaatatttatcatttttttatttatcatcaatcatcttaattcttaagtgatattttattaaaaatatatacatattttagagtatatttctagaactatgaattatagttctcaaatacattttcaaaatatgtatatatacttctagaaatacatttccagaaaacaaaaagggtgtatttctttaagaaaagggtataatgaataattgggaggtagaaagggagcatggggtgtacttagaaatatgaagtgtaaataataagagcctttaatattagaattttatttcatgaatcttgttaacttttaacgtgatccagatccagaagcataacaaattggacccataggctcggttggtgctaatcaaacgatgcgttttgcggtgttaacgaaagagaaagacaatgaaggaggtagagcaagtgcagttttgttttattggttgagaagagaaaagaagagaataatgtcgtcagagaaggaaacagagagtcggaagttgggttcggaagaaatttcgcgcgagttcaaaaccctagtcagctccaatgatctccactcccttaaccacatgcaacacaccatgtgcgtgtcacaatctccaattcaatttgtttgtaactttgtgtgttcgttaattgattgattgaaatgtgtttcagattgggaaggttgcaggacagcaatgcggtcttgtcgcatttcaatgacttctctcagcactgcttcgctgagatttccggcgacatcgctagaaacacgcgtgttttgaagtctgtcaagtctgaccttgattacatctttcagaaactcaggtattctttttcttttcatagccttggttactctccatgttagtaggtttgtgaaatatgggttccaacttttctatcattcttgtaaggctataaatatatatatgaccatattagttcatcaatataggccaagtttttactctttactattttgagtaactagcaagtgatattagagccccaatcaaaatggcctgattctttatagagacttggagagaatatggcaacaatagtggatttttgccaccagttattccaaagtttggtggactgattacttgagtatgctcatggagaattttctgcaatctaattgaggaaggagttcaacatagtgaagcacaaaagaaagccattgagggtgcaagagtgaaagatatgaaggcaaaaaattatctcttccgaagcaacggatcaatgctagagaccatttttgaacaatatatatctaaaagcatctaggacgcctggaagaaaaagaatcaagggacagtgcaagtatagtgttgggaatgtcaattgcaaatttccaaactttaattcaggtgagtggttttgagatataataaattgatgaggaaaaagtggtgactattttgtgtgtgtgatgataatttctaagggggttgagtattggaattgtaagaaatacttaatcggtgtttatccaaaaactcttcaaaagtcatttgccgccattataagagaaatccctgtgaagagaagagacaccaccttaagttgaagggggttcatatgaaggaccgaaaatcttaaatagaagagatgtgaagcaaagatgtgagaagatctcttgtgagtgagagtgttatcatcccttgtaactcttgagtgggagactcgcgtttgtagggtgataaactatttggggagggtattttcaaatttgccagaaaacttgtaatcttatttgagatggtgcatatttgttgagatgtttttgtggatgtaggcaggtggtgtcaaactattaaaattatgtgtctttcactatttctatcagtagtgtgttttttgtgtgtgatcctatagtcaatctttcttgctgcagtttcttgcacctgtcaaatcatttacataaggagaattttgaataattttaatcctgatcaaagtgatggcacaacaattttctatgacagttattcagcaattgagctttcaaaaagtctgtttttcatggccatagctagcacatagatgtcagatttcactttcttcgtgatctcacggggtggagttgtaaagttagtccactgtcatactcaagaacaatttgcgaatatagtgaccaagccattaaagcttgatttgcatgtaaagctttgaggtctttgaggagtatgtgttggtccaaatgtaaactgaatgatttgatattcagtttaagggaggatgttgaattgttaacatttgcattagtttgactttgaactagtctttagatattttagtgatttccttcttttagaaattagatattgacttccattttaatctcccattagtaggttttactgggctgcaactttatgttattcttgtacatctatatatatggttatattatttttatcaacatagctcaaatttatctctctcatattttgagcacctacatgtaaaaatgtcctaatttgaagatgatagttgagaagggagtaagaagcaagtggatgattttgttttatattttgaagaacttattcttatatgctatgttcaaagggtgttattgtgaagctaggttatcgatagcggccgtcgcgatcgcggatgacgtggccgcgatttggtttgtagacctaggtcgaaaatacgctcagtatttaaagggctgggttacgttcttgtgcgacttgccttgactacttttgtgcgaccttcgttcactcgacgtacctgctcggccagcagctcttccttctccggcggcactttgttctccttctccgtcgaggttttgttttcttactttctttctctccttctcatcggtgtctcacactctcaccgtctctttccttttgggttacctctgtttcttcttctttcttcttctttgtcttccttcccttgtcgttttcatgcctctgcctccgccatgctcaatcgagaaagagagaaatcgagaataagtcacgaggtctcacgggttgggagagaaagagtttttttataaataacattagtgtttttttttattgggcccccagattgcttcttgcactccctttattgcttactttactcttggttcatttttttttaattaaaaactggacttgtttttaatgccaactagggataatctattatttgttttatgattttccttttattatattttattaatatgaaatacactctatatataaaaacattagaatagcggtcatccgctatccgctatcccagtttgagggtggctgctccgctccgctatcgggattgataactatgttatgaaggagcatgtcagatataaaatcatttatgttgtgctccacctaacaacttaagcctttggttttcttgtgtttgaaaattaatagacagatattcatgtaactccttcattggtcatgctcctagggaattagcagtcattcttcttatcaacatatcacaggatgttttaatggagatgggcctgctgttccctctgtctaacagaagaagaaactggcttttcaagtcataatcaattctgcatatatttatttatttatttatcttcagttgtctgaaatgaactgtcactgtacacctatgttgattcctgctatttcctgaggttgatctacaggaaaccacgaatttctcctctaattggttctatctccatactccctgtatgggctttctctccggtctcaagcaaatcaagtttatcatatatatttgtctcacaaaaaagattagtttcttaaatttcaatgatgtcccaaataaatacattacaataatacataatttagttgaattgttatacttagtgttggaggctttggttgtgatcgcataggcataaagttttccacacttgttattgtctcctcatgtttttgttcatatggtgaatgcatttttgggtttcgacacttccatgtctctgtatctggttccacatttcgttttggacctggtctggcttgacaatagctagctgatgtattggtctaagatcaatcagcagctaggattttagacaaaaatgggtaaggctacttagtgtagagggaaatactttagtgtagtatgtacaggtgcaaagtgcaatgtgtctgcaactatgctttttatagatatctatcctgtcttcaagttcaataattaattaaatgcctgaaatataaaggttataattttaatagttctataaaatgaaaattcctaatattagtatacatatgccttattgacattatatgtacataaagactagatgattttcttttatgttttctcgctataatgcttcctataataagtgttttctctagtattgtgcacaaaaagcaatttctttttttttttctgtagtcaagccagaaacctttgagttgagcacctcgtgtctacagttggaacactttctgttctgcaggctatttagtcattattgatttgtgctcgtcttcagtaataaatagtaataaaaaaaatatcaaatgtaaaaatatagtttgggcctttggcacagtgctggggtttgtaaacaatctaaattgaagaagaggtaaaaattggaggaaaacctaggttggttattaaccatatgttgaagtattgatggcattggtaacaacaggaaatatggtgaaagagaagcaagtaaacagtaggagcgaagccaaaaaggcccaaagctcaattgtggcttcctaacaaatgaagagatggaaatgatgataactatggaattgggtcttgtgttatttgcttagatgcaccatttctctgtatgttacagcttataagtatcgagtatcctagctagattgctagtgtctacattttgacgttacaaattactaagttttaggtcttcacccgaaaaaaaaattacgaaattgaagattgccacatgtgataaacatgatagatgataaagtgaggcaacagtaaaagaaggattgaaagagcataaggtaactgtatataatgtaattaaacaaccacctatctgtgcatgctaccccccaaaccacacacacatttctattttttgtgggttcttattttcttattttatttactttacgaagtcttgcattaaaagcttggttaaccctctcttgcagaagtatgaaatcaaaaattatggcaacttatcccgacgcttttcctgaagactcaacgagcgaagtgattgataggagaccggatcttgaaatgcccaagtaactaatgttattagaacacagattagaaagagttatatgagagtttgtttttggtttttcttctactcttgtgataaacttgtcctatttgtcttaaacgttttaccagagcttcttgcccttaattaaattctctaaacttttgtctatacacttttatactgacagtaaatgcattacgcacaaatgataaaatattttcagatagaactttggttttgttatgggtgactatggaaatacgggtggcggtggtgcaactcgtgcggttcactaaaaaagatgagcaaaacgactgaaaaaagaacgagaaaccctcggtcaacattatcatttttaatctctgaaattataaaagaatctaaattttggaaattattaaattatctaaatcgcgactgtcttatggattaatatgatcaacaaattttaatttcattagttctgtatttccgagatgagaaatactagtgacagtctaacattctttcaaatactcttttataattagttaaaatttattgaaaatttaatgattatttctcctaatttatattaaataaaaaatgaaacttaccaaaattgataacttttaataaattttaaccaatcatcgagagagtcttcaaggaaaagtgtcactagcattcatcttgttgagattactattatctttgattctatatataaaaaacatcaaacaaatcattaagatcaagaaaagtaaggtcccatttaatgtcatcataaatttaaattatattacaaaaatacccttaaatttaaatgtgatattcacatttaatgccaatactcataatccaatgaataagtaactaaaaaattttaaaactaatcattatttcttataactagtaacaaaagaaaaacacaattcgtttcctaaaaagtagttatatattcacaattcagatactaaaatagtaattagtttgtgggggtcaagtgaggtggtttgataatacgtttgagtggagaattggggagggtagaaatttaagattttggaaggacacgtggtgtgagggtgggtgtctaaaaaacttgtttcctagaatctttgttaattccgaacaaggagaagctaccataaaaaaatatgaggaggttggagtatggtaggtgagggtggatcttatttggcggagggagtggtttgagtggagaaggccttggtggaagaaatgtatagattggtggatggtgtcaccatttcgggacatggagatgatgcttgaatttgggtggaagattagttcaaattcattcactgtgagatccacctatgagctttacatagattaagagattaaggttttgttggagttaggagaggaaggaaagaaagagatttaagggaagggagggaaggaaaatgagggaagttctttcctccttgtttgagagttaaaaatatattaagagagggaaatggagagttgataagatagatacttttacaattttgtccatacttcaaaaattaatacactctatatttacaaataaaacttaattttaaatttgtagctggataggatagtaatttattgcttttccttctaaaaccccaaattggggaacaacaattttaatgatttggaggattcagaggagttttaaaatcctcaaatcttttcctcaaaaattaaaactctcaaacaaggagatgtcaccacctaaacctttcccttccctccttccctctaaatctctctccaaacaacctaagagttggagccaagagaaggacatctttatgagcctatgtaagatcaaagtgccaccatagttatccttttttatttggtgggtcttcctaaataggcttccttctaaggatatctcattaagagaagcattgatcttgaggatgataatggttcctgccccctctgtcacgaattggtcaagaacatttaaatcttttattctcttgtcctgttgcatacaatatcggtacaatgtgctaggggcactctcaccaaaacagccttgatttgattggtaacaaggctagtagtgggcaacaggttggagtgtcatcgtttggaacttatggcaacaaggttatgttatgttgtttgaaggaaaaccttttgataaggagcaactatggcacaaaatcatgttttctatgtggacttggttgaagtcataccacagagattttggtgcttcattccagcagtgacagtgcaatccctcggcgtgcttgttatgaggagtgatggactttctgtatgatgtgtggctgattgatacctaaggctcgtatcttcccgtatgcaggttctgtgtaaactaagattcgacctcttttggttagataggcggcagacatcttctggtttctttacagctattgtttcataggcctcaatttttgaggatcccgatgtgtaatctttgcacactttcttgtgcagttaatgatgtcatttgcttaaaaaaaatattaaaatagtaatttactcatttaataaattaaatatattaaatacaccgagactaacgagaagtcatcaagacaagaatgaaaatgtctttatagggtagcttcctacgtctgatacaactagtcaactgttactttacagttttaccgcatgtattctagctatgcaacatttttttcgacaatggtggaaacaagccatgaatgaatttaacgcttcaggatgccacaattaatcaaaaagcttgctagattaaaaaaaaaaaaaagacggacatgtagtgtagtaacataataaggccaatcagtaacaaatgtgattgatttaattgaactgtggtgttaataaaactaaagaactaaatctgagatactagctaaaattgacggtgaaaaaaatcttaaaagagcaggaaggactactagaacaaaaacaatattgtgacctacttcatagccagaaaacaccctattacataacagattgtccacaaatataaatctttttccagtatgcccaagtcaatcatcggatagaaaataaacagagactaaattaaaacgaaaactcaaaaacttaaaagccaactatatttcagtatttcccaccttgcttctacccctgttgaaagtaacaaagtaagctgctctgcaacaaagtagatctaaatgtacaagacaggaaacgaccaaccaagtaaataaaaagaaagaaaaaaggcaaagtgaaggataaacccgaacaaaaaccaaaagatataagcatcttaggcagaaaaccctaaaaaacccaaaaaccctaggagtaaaccctgttaggagctaaccactgtaaacaaaacccaatgagaagggattggtgctagcattctatgaactaactccgcccagccaatctcaatatacagatctttatcttcactaggcaaccaatcacactatcttcagactgcaagagaaggcaagacaaatcaaatcaggcggtaccaaattgctgataaatatacttctaagaaccaatatatgccactgaagtgggttggaccgcctccttcgaacacattagagcttagacaccattagaaacaaccccattggctacaatcttactctcgggaacaactggtttagcaccctttggggcatctccagtttttgtagcagatccattctcgggaactttgtggtcatcactatccttctcagcaagggtagactccttgagcaattccgagctaacttcagatttttgagtattaacttccccatttatctcaattttctcatcagcaggtttcccttcccatacctgcatcagtagagtaaggtaacaaaaatacatcatcagcacacacaatcaattatttcacttaattagaataattgaaatgtgacttgcctgctttgggaattgttgctttgctttcttctccaaaatagttttctgacgggcctcatagaagccaaaatcatccagaatgcatgtcttgctggtatattccttgaaaattttaattaatttcagcccaggctccaacattacctgcaaacataaacttggttgatcagattaaaaacaaaactacattacaaagaactgacaactacaagtgcagaaccaaattacctcttgtgtatccctactgttagtgacaggtttgttctcattgttgtccaaggtaatgtgcctcaacaaattgttaggaacatccttaacaatgtgccacttaagaggaaagcaaccattccacttgtcttgctgccaatactcaacactcttgttaaaatcaacaggaccaaccatctcagcaagccccacaaattgcccactggtattaacctgcataggcacataacacattagctatatataaccaaaactgcaaataagagtaatgacttccatcattcacagagatacttactgagaaaaagagaaaaacaggggcgccaccaggtttctgctgtgcctcctgatatgcagcatcaagcttcttgttgccattttgtgtactagcccacacattatacttaatactcttatggatatcatcctcgctgtaagacttgatgacaaaaaatttggcatcagtatattcttctggaaaatcagctttgttatattgatcaaattccagaatggtatagtcttgtctttctcttcatctgtgcctaaacttgcaggcaaattctgcctttgactgccaaaatagttggtgcaaaacctttttggttttgccacccttggccctaggccctctgttcagttcgttcaaaccatctacgttctcattgccatagccaaagtagccaccacttcttcccctagttttgtatttactgtcaacagctaaccaagcccgtccattagtgcgagaatcatacccatgtgtaccataacccattccagatctgacgtgttcccatattgaccatatagtttgtttgggtaatcctatttatgaagctatgggtggctcccatggcaggcattggtcttgggtggtgcaacccctgacaccaaaaaaacaaattgtgaataaataatcataacagcagtctagatagaaacatgacagtatggcacactaagctctattagaacagcacagatggaccaagcaaccaattattaggactttacggccatcaaatttaacaaatagaacaaagtaaaaccagacacttcaaaataggatacataccataaactgagaattagggcggaaagtctggttccttgaggcagcgttgttgccacctgatattgaagaagtgatggttgtgctacttacaggccttggctgcccatctgaaaataatggggcatctagccaggggataggtgagcgtactccatcaaaaccaaatcttggatcctgataacctgaagttggccacgacctggcatagcaaccctttcatttgatatttggaactaaaagatgaattctgattgacctgtttaatagaagcagcagcattattacctttcgcgttgccaccatttgcaacaccattagaatttccattggctgcatcaacagggagaggcttttgatcagcagctacagaggtggaaacctcaccctgaggtaggacagcaggagtaggtgtgaatggcgcactggttggtgttaacggttggaaatatggagggtactgatagtgctgaggcccatacaactgaccatcattccccatggttggaactggagaccctgctggcgaataggggccatagggcgcatatccatatccatggtgataaagtagagacccattatccccataaactccctgcaaatgttaaaatatattaatgtaaataaaacatttgcagcagaatgaaaaagcctgcacaataattttggaaaatgagaaggaaaaaaatacttaccgaagtcatctcaactccttccgaattcacatatctagaataatcatcccactcgttaccagttccatcatatcctataataaacaaaaccatgtcagcttgaataagatttacgtgtttcgttttcagaatttttcaaaaggtatttcatgtcgtttttcagaagcacttatccataaacttaccaccgtaataataggcagtagatgggtaaccatttgggaggtaacacatagtaggatcaataaaatcctgcaacacgggggttacagaccggtcatacgactggatctggccattcgcagcatttcctgaatcaactgatccatactgattcccagtggcctgcacaattgaacaaatccactcaataccacacaattcactaaaagaacacaaaaccaggtacaaatacatctcgctgaacattccaaatttataccactaacacaacagagtgaaatcgtgaattttcaatagcagccataaaaaatacaagcttttaccttcttggtaggctctggaatctccaagggcttgggctgtgtttctaacgatagcttctgtagcaaatcagttgcttctgtgcaaacagcagtaaaggaacacaaaacatctcgaaaaattgaacttttcaacaaccagaaaacctaaaacccgcaacacacaaataaaaattcaaaaaacctaaaaaaaaccaacaccccgcaatcccaaacgagtgaatcagccataaagtcaacaccgtcaaaaactcaagcagattaacaagaacacgagaacagaaaaaacccaacacccgaacatcataaatcagcaagctacccaactaacactaaaagatcaccctaccccgaacccaaaaatcaagtttcagaaacgaaaatccaccggatccaataaacgattcaatacagcagaccaataaaagacaaacacgagagaaactgcacagcagagaaggatacgatccgcgggattagcaacggtggccatgacgaaccaaccacgagatctggtttttctttggaggaggaatagagaaacggaagccctaaatccgaatctgaatcggagagggtttaagcctcaaatcgaaaagttgagaaaaccctaaaaggagcgaagaagagagggaaagagaaaaaaaaagaaaagagagagaagagagaacacaacgggtctcgcagccgccaagggtttgggtttttggggagagagggttttgttcctccaaaagcagtgattcaaatagcaccaccacctctctttaggcactctcgctctctcactcgcgggtcactctgtgatctcattcgccttctcccattggtggatccagccacgtggcgcctctccaccggactttttctttgtaaattatttctacggttggtctgtcgtgcttgtttctttaaggtggtgggtgatgttagtgagaccccttgtgaatcttgtagatgcggggtttgggcaaaagatggaaaccctaattagaaaatgacacggatgtcctcgtccagctggacttgttgtaacccttcttcgatttttttctttgggcaccttctgtcatgtgctccaccacacacacatatcgtgttcaaattcatttccagtttatcagaagaaaaaataaacaaataataattaattatatatttaaattttatacgttattatgcgtttcaattaatatttttaataatagaattcaattattataaagataatttggattttagctttaagaatgttggcaaattttatctacgttagattaatcgttttaaatttgaaataatatataaaatgtttattattattaaataagtaccttcgatattaagatacgacattttcaaactatttgttggtcaagatggggaagataaagataggaccaccgcttacattgttttgattaaatatatctattgtttgataaatcaataagataaaaaatatttttctttgccgtaaaaaacacaaatttattttattttatttattagatcaaatgtttaaatttattgaataaaaagtttgtcttatcttaaaaatagaatagaaaaaagtttgaattacaatttcagtccctattttcacaaattggcattttgattctcttgatttttatttagacatttaatccctctaatttcataaattcacgattttgattcttctatcaattgacaccattacatgctcaccattaatccttatgttgacacgcttactctgaaacacgtttgaagtgcaagcattttctttcccatacatgtatcgatcattgcttcaatttcacttaaacataacaaacaaacttgtatgtgcgagtactcttctgattttgatagagaatctttagttttaacgaacatggtataggtataagtaacatccaatttttttaaataggattgggcatgggtatgtacctacctgtccctacccatacccatatccgacaatataattactaaattacccttaatgtagtattgtgtataatacacaattaattttattaaacttttatacttactaatcattgtctatttttttaagactaaaactaaaactcttaagcaaatataagtcataagggattacaatctctctcaagtaggcatggcatcttgacccgcatccgtggcatccatccgaatccgcctcgatgtcaacggggaaaactgagttgaccgatttcgggttcgaattcgggttcgggttcgatttttcctcacctgttgaattcggggcggggaggtttggtaatgttgataaccaccccccccgccccgccatgctatatttaattatttacaaaatacctttatatatgtggaacaccttggaataaaggcttaattttattcaagaattaggagtataactaattttattttccagcaataaacatctaatgttgaaatttattgtaattacatacaattgggacttagcgcgatcaaatttttgctatggttgttgtttaaattaattttttaatagcaatttttaagtgttcggggtggggcggggcgggggaattttttagcccatcggttttcggaggcggggcgggggtggttttgagggcggggcggggtggtataagtaaaaaccgccccgactcgctccgttgccatgcctactctcaagtctcatgtttcaagacaattttaggtgatgatgactaccaagacatgattgtttggattagatcgttttcggattgcaaacttcaagactccatggattgttgtttgaaacttaaacagaaaaatggaaaagatgaagaaatgatggtgaatgccgtcacgatccgtaacgaagcgataagtcggaggaggattgtcacaaaggaaagcttccttgataagaatcaatttggtttcattcaagaatcaacaggagactaagctctcaatgcaagcaaaatgcttaatttcattaatcaaagttgtccaaaaatagcatagtctgagtagttatatagctaagcctttaatgatcgcctaaaaacgtaagttaggcctattttggtaatattaaacccattacaaaaataaataaaattacgaaagtcctcgcagaggtggcgcgctgagcgagacaagtggcgcactaagcgagcagaggtgtgctaagcctaaaagctctcgatcaggaattgggctgagcgagccaaaggcgcgttgagcgagcagaggtggcttgctgagtgagcaaaggtggcgcgttgagcgagtagaggcgcgctaagcctaaaagctctcgatcaggaattaggtgagcgagccagtggcgcgctgagcgagcagaggtggcgtgctaagcaagaagaggcgcgctaagagagctcacccataatcttcaaggtgcttcaattcagctctttgtgtcttccttcattcttgcccttgttaactagtccagctatgattctcttggtcatcttttcttgaagaagcttggctttgaccttgtcattggacccttcaattcatggagtgcttctagaacttcataatcttggatagtcctctattaggtgataagaatatgattttcatggattttttttattgtgataggattttatattgggtgatggcaagttgattgtctaagcttgactccttgaataataatatatttagttttgtttaaaaaattaaaattatttttatgattttttgtatttttttaaattattaggtagggacggtattgggcgggtatacccaatccccaatgaagactgtgataaggaaaaaattcatacccatcgaagagggaaaggaatcacatattcatccttccccgtctcgttgccatgctaatctcaccactcaacaccaacaaaaatattaaccaaacttacccttctctttgtaacaatatcaaattctcactatatactcccattgattttctaccactttttctcctttgttaaaaaataaaacagtgtgttcccattccctaatccctacatcgtgcccatgtcccttaccataaaacataaaagaagagagcaaaatataaaaaaaaaatcattagtagatctaaaaaaaaaaaaagccatatcatatctaaaataaacaaataaaatagaaagataaattggagagagagaaaacaagaataaggtgatgcatggtcaaaatagtgtttcctatatctgtttttgtgtttcatgtatttggggagaatggggcttagaagaaaatcaagtggttgttgggatattcgcaatgagagtgaggttgaagagtgtgatgatgtgtgaggacgagttcaaaaatgttatgaggttcatcttcgcaaagtgtgcgctgacaataacgacggggagggtgaggatggttcaaaagcaaaagtaacaacaaagggtatggtgggaacattgattaagattgtggtttggttgtggtgttttgttttgtttgaattttgttgtttatgcccattcaaaaataggatttgttttgcatttctctaactcaggattgaatttggtgttgtgttcattaattcatcagtgtttttttatttgttttctgtctattgaagattgggatctaattttgtctcctgttaaaatgtaagattaggagcaaggtgaaaagaggaacacctgacattggggataggaatggttatggtaagagggatgatgttactcaacgttaaagtatagcggtcaatgactaattgacggaaaaaactaaaaaaatcatttttaaacattaagaggaccagtatataaaaatcaggaataaaattgtgaatttgggatattaagaggaccaaaattgcaatttagcttagataaaacatactttggtttggtgaccttataatacttatggttgatttgaaatttttgggtattgattacaataattatggaaaataaaagactaaattacacaaaactattatgaggtttgtaaaaaatatataacctctcttttattgttgagacattacttgtacccttttcattttaacattgtttaacctcatttacttattttctatatattcattgtgtccctttgaatcagtctatcactcttatttgtttccaagaacctcacaaactacaactattggacaacttatttagggttctaaagaaagggaaaattcatgcatttgttagtcgttgacaaaccaaatagcatggtgaacgggtgtaatgagctcgtgcacgatttgaaacaacgatgttaggttcgttcttgattttaaacaatggtgacgatatttgatcatgatttgaatcaggggtggtaaggttcgtgcataatttgaaaacaacaatggtggggttcatgcacaatttgaataatgatggtgaaaggggttgttgcggcaaagtctaagctttcaaacaacaaaaaaggtgaaaataaaacaaaaaagagtgtaaagcaaaacataaaagattagaggttgcataccgaagcaccaaaaccatgaatgttaacaaattattggttggaacgggttaaccaattatttcaacaagttcctatagtcttcatatgcagaagagtcactatcttatattgtttttttcttttttacattaagatattataggttgaagaaaagggtatttgggagatgttatttcaattaaggtcatgtgacaacaccattttctcatttactaacaacttaaatggagatagtggcttagggatcataatatacactcttaaaataactttcacatggtgcataaggaatttaacttacacatcgtagcctccatccataaaacatatttatacatgatttattggttatcatatgacacaattcaagagtgtaaattatgattgatcattcaatacattaaaagtaaatgcaagggaaaacagcggagcaaagttttggtaaaataaaataaaagtatattttcatattcaagatggttatgcttggagttttataatatcttttaagagagaactatttctcagtttttttttttcaaaaaactatttctagcatcctcttcaaaagatatgagcagaaaaaatatatatatatatcaaaaagggaaacttaattgaattgaaaatgtttttgaaaaaatataaaagggaggtatatatatcattgcatgtatagcgcaaaaatgctcaagttcaatttgggttgttaaacaagctcaaacttataaaagtacaattgttgagcttttaacgacttttgtggcttggcttgtattaagatgtgattgtctaggaataaaaggttagtgttttatttatttataagctagaaattttgggtcaaaccttagcttttcatccaccatgttcggaccgacttaattgatctaacccattccccccttttaaatatgagtatttatgaaccaacccaattcaataagaatcaagaaaattgattcaaaaaattgaaaataaaataaataaataaaacaaacgaatcaaaaaatcaaaaaatcaaaattttattggattggataaaattttagatttaatttcaaaagtcattcaattcaaaccaaatggaacttgttgtacccatatatatttattcataattgataatatcactcatgtttatattttatttttattatttgtaaaattattacataacttatacatatttataaaaaaatatttaattgaagatcactttttactaattttttgaattaagatgcttaaatatagttatataatgacatataaataaaataattaaattagaagaagccatagacgatatcaaaggaggtggggacagtgaagttgttgtggttggcgaaggtgacaaagttgatgagggaggtgaggagtgagttgacggtgtcttcgtaggcaaaatccaacgtgagctttggcggggagcagacttgggcaagagtgataggcacagttaataaatgatgattatttaggggagataaaagaaatataattttaggagggtgcaagtgtaataaacgttaaatttagggcatgagtataatttgctctttaaattaatattttctcaaaaaaataaaagtatgactaaaattgaaaatctatctgatcactccaactgtttaaattgaattggattaaagttttgaacaaaataattggataataaattaaacaaattcaaagtgactgaattgaatgatattttcgttcaaaatcatacaatccataaatagtcatacttctaaataaaaatgtggattttaatttacgaatccaattatactactcaattaatattagacagccttaacttaacagggacagttttcttaaattcactaaatcattagaagttccgatcgaacatctaattcttattgcaaataataatataacatatacacatacaaaatctcaaactttagtttcaccaaggtgaaggtgaaaaggaggagggggaggttacaaacactccaaacctgttgatcagtccgataaatttgggtttgttcctccacagtaacacttggatcctccattaaaccgtaatttgtcatggcaccatggcaatctttaccaacatcgcgcacaaggttgcggcaacaattttgctcttttccggtgttagagaatatcttctggagcatttggtcgccacagtttgaacgtaacttgtgcgtgcaattgatcatatgatccgcataaggttggagacttggagtattggaaatcctccttcatgtccagcgcagatgtctttcaagatatctggctaataaagtggcaattaccgcaaacagaaccattattaggcaaaacttgttaagggtccacgccgtgaccactgtttatttagatgaaatctgattattgtggggtgtgatgaaaagctttgttggtataggagctgaatatgtagtaagacctatttacagttacaaaaaatgaagtttaatttcaagattcgtattaatggatttttgctcaagtctaatgaaacaaacaaaataatttgatcattaattactgttatagttaagttaataaatggaaacctttgctttagcattcattacgtgctttttattcccccagtaacgaaggacttgtttagagtggcagttaagtttatttttttttaaaacaaaacattttggttgagtcgaaaaaattgagacatcaaagttatatataatttaaatcactagtaacttaagtccttagtttttaaataactttattttatttttataatttgattataatagaaatatagtcaatataaaagtttagattgaattaaaaacggtcttaattaaaataaattatttctgtaaattgcaggcacatttattataattcaatagttatacatagttaagttatgcatgattattcctcaacaaacagtcccacctcaagatcttgaatttgctcaatacgtgggtcctcaaacttaaaccttcgaaccaccattctctctcgatcttcctgcttgcaagaaaatccagatgacagtccaaccacatatttataagattttaaacaacgtttggtatactccagttcagccaacaataccttatttgaatccttgatatttaacaaggcttgagactggagattcagacttggcaccctctgttgccacaactctcttttgagatgatgaaacaaatagttagaaatcaaaacaaatgtaaaagaacttaaccaaagaaaaatcaacatgcagaagatacagctctatttccatgttttgaaacaccattggcagttgatttcccagccttagctttcgatgttgcaccctttgaaactgctctaccataaattcctcaagtggtcacttcatccatagaaaaagacattgaactcttgcaatttatacaccaatgcaaaaacactacccaattcaacaaaataacacagatgtacttttttttttaacaagtttcgttttcaaagatatatatcactaggcacaagtatttttcaagcacattggaaaccagaaagatggagttctacagtgtatggcattactagaatcttataaccagtagctagtgtatttaatgcagctttcctagtttcaccatccagttctgcagtcaaatttgcaacaatttgcaatgactttagctgccactaatctgtccacataatgcaaggagtaactattcaaggaaaatactgaataggaaaaagaaatcattaaaaagcattagtaacattacctctgcaccatgatgatcaataataaatccaacaagatcggcacattcaattcgagttcggttattctttgagcgcaaaccctgtaatatataagggaaacatttagacgcagaatatatggcaacaaattgttttgtcagctccagcattttttctcgtacttctcaatgttatgccctaactgcaacattaaaataagaaatgaattgtgacttactcatctgtaacaccctaggaagtacactagtcaaacctagtatctatgtaaaccaaaaatttgctgaaatcaactataccatcagaaagattcactggaataacaacatcctcaggtgtcacaaatactaaagttgctaatataaaccttctctactaagcacggaagaaacactaccccttcagaatcggtcaaagagtacccctcgtccttcaaagtgtcaagcagttcaggaagaaattccagcacctaagcaattaagaaaagataagactctatcgagtaagtatactcctataaattaaattgaataaagttaagactaacagccgacatctccatgacaaggaaggaaaggaaaagaagaaaactgaaatcacaacaaaaccaaaaataaattgaaccttcaatagacatgttgtgtttgatttgcagaactgcaacacaaagcacctcagaagaatgtccaatacttctacaacttccttagcaatggatggaagtgcctgaaatgtgcaatagcagtttgtataagttctagtgcactcaacacttcaaaagaatgtaattcacaaggttaaaagaacaccttcaaaagttctagccgatgtagacagcgtactgatgatttgaaggttaaatcctccaccagcctacctatcacctcatttacctacatgctcccccccaaatgtaaattaaaaaagtcacaacagacagaagactaccaaccttctagacgctccttccacacagcactttttaagagtgatagtatccgactgtataagagaacctattcggctttcaatctctttaagactcatctcagtaggctgcataatgttagataaacaaaaattgtatgataagttattacagaaactgtgtcggaagattcagatcagggagaagacaaacagatatcaatttaactcaacatccttaggtggttcaactgattttgaagccttcacttgtggaactccacctgttttttttgtttgtccctgactttacaatccccccttttcttagcaacaggcttgaatgtgcaaattattgagcatatctactcgcatgcatataaaataataccatgttaattttacaagcaagaagatgcaatcttacaactgactgaacaggtctctttccactatgcatgcctgctgctgaccttttgacaagtacactttcagaggtctgtatgcaaatcaagttaaaagtaaatgccagtctccaatatatgctttcaactttaaaattaaaacattcataaattttattatatccatctttaacatggttctcaaattcctgtctaaaatccattagcaatttagcattcatattcccatttgatattaaagcaaagcttgggctcacattttcttttcataccaagagttctgtctctattgctcacaatcctgtgttccatagctgcaccaagcatatggaaataaatgttctttgttcgggagaaaattctggccaagcagctatccattgtgcatattcctgccctggatcaatggactgatgttctcaccaaacctctctctactaccagatttaactttctcaaaagcaaactcaatgtaaaaagtttttcttctgaaaacttttccccttgagtttgaggggggatattagaatatgtaagcgctgttagcagatagtattttgctaactgtacctctctttgtataagtgttagtttctgttattgacagttagtttttattctgtcagtatcagatcaagaggttataaataactcagttttactaagcttcaattaacttttcataataagagaacaatattcagagttactttctgttttctcttttctcttcttttcattctgttcaacaggaaaggaagaccaaagaaagaaaggaaaacttgggagagaacttccaaactacatatagtccaacaaaaataaccagtcaactctaggtgcaacacataaagaaatgaaactgaagattagtcaaactaaactaaagaaaagaaaattaaacccacctctgcagaagatgcacttacacgtgtattttacacagaagctggaacatcattatcaagtgtcagcataaaagaatcaaatttacacatttaaaattaataaaatcactatatagagagccaatcaaactaggaattttgaaacataagcaagatttgggaaatttcaaacagtgtaactgaccatttgagtgttgcccagcatatttatagaaatttaatgtctggttgaggcataactcgaaaagcaattatcagcatggcagtaggaatttattatgtgattatcatggtcacttttaatgggtcatatccaaatcaatggaattcttttaccaataattattataatcaatggtcaatctgatccaattttaaataggttggtgccaaaatagagaaacagcatatgttcaaagacattggcacatacactagtaaacccaactttgaaaagcatataaggttgttaacatttaagaaggcaggtgaagttcaacccaactgcaaaagtcaaccccctaatttgagaaaggaatcagccacgtgcatcacagattgaaatagttaaagatgttcaaagacatgggcacatacactagtaaccctaaatttgaaaagcatatacggttgtaaaaggtttcagaattgaaaaagagaaaaaatcttcaacttcagaaatgaaatatttttgtattaactatcccaactgaaaagtagttacacctgtagtatttatactagagctacgtgtgctgtttacaactgtcataactgacagagcagctgtcaactaacctaaggttgttttttttatcagcaaaaataattatattaataaaaatatagtagcatcagtacaagtagtactactaagattacattttcagaatgcaaacctgcagaagaagcaccaggcacagcatcttcagatcctgaaatcatttccgaaagctcatttcttctaacatcatcaagtttctccaactacctctccagaggtctcatgccaactgactataacagagtgaacaatatgatgctcaaaatctcaaacagcaaaagcacattcacaagcacgcaaacagatgtagttgtaacaagttttaccttagctattcctgccaatactgaaaaggcagcatccctgacttcaggaataccgtcatttaggcactgcaatatccaaattttagcattttaaaaaggtgaataaataagtacaaatcaaacatcgacagtgtactttaaaaaaaaacaattgaaataaattgaatcctataataaactacagctcagaacttgaagactatacatgaaacaaataaacacgactgtaaccgaacagtttattacatcaagttcagagtagtcctactcctacaccaaggatagaagggggtcaaactgatatttaaataaaaagagctaaagctgctgaaccaaataaaagccagagattctaaatcacttttaaattccagcaggaaaataagagcattttactaaacaaattaaacggcaagaacaaactgacctacatacagattggcacatattccttgtgcaccttcgtaataaaacccttgttacttgtttgaatacaaaaagtcacccaggtcaaggttaacgatcgcacaagatggactttgtttttggtggctgtcttaacatctgcaacagattaaatgtaatacactcaacaagaagcaaacataaaaaactattgagaaagaatgataccttaaatagtgaggttaaaagaacaacaccttctgcagcatttcaagtccatcaacttgcttcttaaaatctgcacttaagagtcgcctatgtaaatcctctctgaaatacttcatcctatcattctgcaaattgcaggcacatttattataattcattagttatacatagttcaagttatgcatgattattcctcaacaaacagtcccacctcaagatcttgaatttgctcaatgcgtgggtcctcaaacttaaaccttcaaaccaccattctctctcgaccttcctgcttgttagaaaatccaaatgacagtccaaccacatatttataagattttaaacaatgcttggtataattgcgaggacgataactggacagcaactaatcctccaatgctctgcaacgacaattctgtagtttgaaagcgataatagctctcgattgattattatacatattctcatctaaacccacctgtatcgaaaattatatgaccgccacgtgctgtatgccacggcatcatgggaataatgtcttcaaaatctgactttatcaaggaattttttctctttacctttacagaggttcaagagacccacttttcaatctttccatccacgtttgaagcccggacaatgttttctcatccataggaagtacctcaccgtgcattgtattctcagtaccaacatgctctgatgcatgaggaatctgactaggaggaggaagtccctgattgaagttgtcatttgcacttgttaagtgcctgccaccagatactgtactaccagcagcagctgctaattgcatgcctcttcatcctctctctgtttgcatccaatgttccactggtagttcatatgcaacttctccaagtcaacattctttcttttaaaattaaaaatagattcaaaacaaatagaattatgttaccgtacctcctgtcataaatctatcatttctttggtcacctattgtgtagtcagaatttaatgctctagaagtaatgacaatcacagccctattctcctcattgtatgaggatgggggttaaaatttgttggctcaggtttgacatttaatttagcatcaccgaatggatttgcgtttacaggtgagaggtgaaaaatcaggggaagatatatttaaagatgctggtggaggggttggcatcggtaaactcaaaggggttcttccagctgcagcattcttctccatctgccaaaatgttaatatcaattgccaattgtcaaatactcaattctactactctaaatcgctggtacaaatacaaaatgcaaattcaattaagaacatgtggtaatacaagtaaattaactaaacctgatctctaatgtaggtgcgaaatgcctcactagcattttgaagctgagcaaatatgtcaacctgagataaagcaccagaaccttaatcaattgagcaaaaatgatataggcttaaggttttattaaaatcataacattacatcttatccaaatattaacatgaaacttgaaataggtgtgtttgtgtttggtacggtggaactcaaggaaggagagaaaattttgaaaataaaattttgatttctgtttctagtagtcaaattttctctcccttttcctttcactttcttaccaacgaaacaagaaaatgcatagcaatgtgtttcctttcttctttattttcttttcccccaatcgaatataccattaatacttatctttgggtacaattgggtaatctgatatagttcatatagatcaattgtgcaagtttgcttctcccgaatcttcttaaatatagcagccagctctggctgcaatttaattttaaggataggaacagagtcaagggtaaatagcctttgaatttgcagtaaaataggatattagggaagaataacacaaataaaaacataatataaattagaaatattgacatatatatcaattgttattaggatcgcaaatcaaatcgtaggatcgtaagatcctaagtttagccacttctgcgctgactgctcatgggatcattggtgagtgagattagcgtatagttaatgggatcatctgcaacccaaagttcagtctagtgatgccaactgcaaccaacccacctccagcctgcgccccaccaactgcgtctcttctttggctcaacgaagtgcaaactgcaaacaactggctctacttatgtttttttgaaaatgttatgaacttaagttgagtagtgtgttttcgaaatactgtatttggatcttatgacttattgtgatttgatttttcaataagtttgtttaacgttgtgaattagaggttattttctttcttgtgttgtttttttatgcatgtgtgtatataattttgaattttaggtagtaggatcttacgatctaagtcatgaccctttgtagaaacttgagtttaacaacaattgatatatctttagtgcccaccaaaatactgagaaatagagcataatgattgagcatcagccgaaagggtgccccaggctgaattattggttgctgaatctccccattggttttgtctcccaggtccagatgcagtcaacattcttgcagcagccaaagtctaaaatacaaaagtgagaataaatacagtataaataagtctactcctacctcaaaataagttaatttgtttgaatttatacctcaagattaagttcaatgtaggcaaggatgatgggttgaggtttagcatcgataggaaccattgaaagatgaccctttattgctgcaccacaaagcttgacaagttcatgcagaacagtttttaccattcgtaaaggtttgtcatcagcaccagccctatacaacattagaaaataaaaagtggttctggctttattttataaggaaaaaaaagaagaagaaaaaagtagtaactctacccaacaaagttatataccttctcctaatttcctccattcccaagtcttgcaggtacaaatggatgctttgaagcatgcgatcaaggtcaacatcatagatagtactctaaagaacctgcagcacaaacaaatacatgttaataagattacaatgaataaaaggtatcaagacagaatttggcaattttaactctgcttcttcaccatgaaaaatagatcataatggatttgtatcttgaatatctaatagatatcagttatacattctggcccattatataatcatccactaaccaaaaataatataattcatcaaatccattaaatatttcagcaattgtgcaaacggtgagcaaatatgaaaaagtgtgcaagccatgaacagtggccttgaatttgagaatggaattcaatcaaaaagggagaggggagtgggatgagtaataagagagcagtttgttgcattgattgtgaactgaacaatcatccattcaataagcataaatcatacaaaaaatgaccaaaaggccacccatacctaaacacaattagatacataaattttagagtccagcacaaataatcaattagccctgtgatccagcaactattggtttatgggctatattacatccagaccgataatatttataaaaaaataatagttaagtttatctttatctcatatccctctagattttactgatgactgcacaagttacctttgtaagcgtgataaggcatttcacaactagatcggagaacttctgatttcttgaagcaagatttatgggctatattacgtccagtccaataatatttaaaaattaataaaatagttaattttatctttatcttatatctttcaagattttactgatggctgcacgagttacctttgtagcaatttcacaactagatcagagaacttctgatttctggaagcaagtgactcatttgatgctggtgaaggccacctggataaatctagtggccgcaaaagattgatcaagacaacaaaggatgaattcctatctgcattatcctgaattgacaaacactagttactaaaataggcccaaaattaatgaatttcacaataaaactttaaccatacctcaatattggaccagcaagagatctagtcatttctccactttgttttgtgacatcatacctgataatggaagcaataacataataacatattcactgttatctatattaaactttttatatttgataatctacacaaaaaacaaactcttcacctaagcaaaaagattttggaaaaaactattgtacaattcataagggaataatgcacaataaagattggtattataggttggcactaatgacaaatgtgtaactccaattttgattagtgaatagtactaaaacacctaaagaaatgcaccatagtattatgtatggattttggaggttcaacctccaggcttaatgacatcccataatatggccatcaaaacaagagaaattatagaggggaagaaagagaaggaaccaaaaaattattttcaacttatctgcaacaagtcactcaagtgacagattcgtcaagggattattaattaagaattgtaaaccacaaattgaacaatttattatatgcgtttaattctccaaattcgcacatccagacatctactaactggctcagcctttttttcaaaaattactttctttaactctattttcattacccctaaaaaattccatactataattcttaaatctcgacaatcacagcatagcttcccacaaaaccattcatgctcccatcatacttatttaaaaggcaaaattagcaaatatgctcacagtaaacaaatgcctaaaaaagggactcccgtcttgtttgttttcattttatagatgatgatcaggatcaaaagatcagagcacaaattagaaggaaatttttaaggcattaactgaaaagcataaaatacagaacaaattggaaagaaaagacacacccattttccctgaccgagcgccttaaaatgcccttgcttcaccaggctttccttgcttcttcttttccatctcccggacctagtaaattacacaaccaacatctcaagaattcagtatagcaaaaggagaaataaacaagtaaagtatgtactgaccttccacttgaatctatcatctaacatgctcttttaagcatcagttagcttcccaacatatttccatatgtcctcacctgcatagcaagtttatagaaggaaaataactatgccaggccaagaggtatgaagaaaagtaaccataatttagcacataaactcctcaagtggtcacttcatccatagaaaaggacattgaactcttgcaatttacacaccaatgcaaaaacactacccaattcaacaaaataacacagatgtacttttttttaaacaagtttccttttcaaagatatatatatatatatatatatatatatatatatcactaggcacaagtattttttcaagcacattgggtgtagtgtgtgtttttggggggtggaaaaaataattgtcttgagtgggaattactgtaggagacagtggtctcttgggaattaggaattcatctctcctaattctttctactgaattgtaaaagctattcttggaaggaataaagattcagcgtattattcagaactttctgtgtttgtttgaagattcaagaacttctatttcttggttcataccaaaccacatattcataagattttaaacaacttttggtatactccagttcagccaaccataccttatttgaatccttgatatttaacaaggcttgagactgatcttgaaaatatattgattcagacttggcaccctctgttgccacaactctcttttgagatgatgaaacaaatagttagaaatcaaaacaaatttaaatgtacttaaaagtacttaatcaaagaaacatcaacatacagcagatatagctctatttccatggtttaaaacaccattggcagttgatttaccagcctttgcttttgatgttgcacccactgaaactgctctacctgactcaaatgactctaaagaccgaaaaaaggaggagtaagggaagatatataagcaccaattcaccaacattcgcaaagaagaatgaaccaaagaacgtgccttgaaaagctccgtatgggtttaacttctcaacaattagtgtcggtgctggtccatgaatgtctttaatcatctttttaatctaaaaataagtaaacaatgaagatgcttgatattacaagaatattaaggaaacaagggaagaaagcagcattcttcttatacacataccatttcatgtctactagctctcagtatctcattaatacaagctctgatgccttgcgaacatcggaatatttatcctaagaagaactcatcatacattttgttccaagaatatggaacattagaactaattcgataaatggtataaaaaatgaaaaagcagaatgcagagtaaccagatcatactgtcattgcagaagaggaaggcttcagcagttgtgcagcttcagcaaaactacttaacccagaaagttgcctcgataaccaataaaaatttttttacgtccttctgcaccaagtttagagtccatcaaagcaattgcaatatatggaacctacaggaaaaccatgcaaaggacacagataccaagacaaaagaatgaaagaacacaggaccagcacagaacacagaccatttcaaccagatggacagcagccagccaagcgtctaatgtattcagcacacgttctctcatgtgcttcttgttgtcaccaagacatttcaatatatcaaacagaataccctgcaacaaaccatttccagaaatgttcaaacagaaaacaacaccaaatggggggggggggaatacgaaaacagaacagaatccacttaccttgcttgccttctctacagcttgacccattgctgatgcaacattgccaattgctgtcaaggaagccatgacaatgtttttgttgctattaacaagtcgtcccctaagaccctaaacaacttacctggtaataaaacagttaggaaaaattaacaaaataatcagctagaaatctagaataattaccaaaagataccaagcaacttatccatttggggaggaagttgatgaaagaggagagtaaagagaaagagagagagcataaggttaaaaaaattataaaaaaaatgctaatggagtgccatttccagttgcttgaatgcgcttattagcctcttccaatattttgtttacagcatcaacagactccatacgaacctataataagtaatgcacggcaacattagaagcaatagcacaataatacacttcttcaaatactgaaagctaaaagcaaccttaaaatacaaaattaaaagcaaattgctcgctcttatcaaccaaaccttccaatcagggccatgaaactagcctatctgcatctttcacaagttcattcatagcacttccttcaggatcactagtggcctgagctaactcatgacaaacaactttcattccatcaacagactgcacccaacaaaataaattttgaaattcagagttcaacctccatttttgaaaaccaaaaagagaatagggggaatatctcaaacataatatttaaaaccctgcatagaactaccctcatcaaacataatatacctaaaatggattcttctcatactctgtatccggggcactgagcagtgcaggctttaccatcagtaagaagaaaccctttaatgtctgcaaggagaaaaaccttagagccttgaaaacaaaattgagagaaatcaaaatttgaaagttaacgcaaagtgaccttgaccaacaaatctatgtagaacacccaagaacttaattgatgcatttctagtagcagcattacttgactgcagcccaatttctttaagaaaattaattaaatcctgaaataggatttacaataaaccatacaaacttccaacaaaaaacaaaatatccaaaaaaattgtaaattcagataatgcaccttcagctttatatgtgagacaccaaaatcttcaacagcagaaaccatccacaaaattccctcactaagaaccttggggttcttatgctccttcatgatcttgtaaagctacagtaaaattcacagtttttcaaacattatttgataatacttagataaacataaataatgtgatatacggccaaaagttacaacctgcattttatatgaattcccacatatatcttagattcttaaaatgtgagtttaagccttactcataaggtgagggttgtcccccacttatattctctatcttggtactatctttagccgatgtgagatttgggttttctccaataaactttttgtcaagtttcataaaaagaatttttttcccttactaaaatttggtaagaaattatgagactacaatgaaatatacaattttacctgattatctaaatagtcaaaaacttattaaagaaaaatgtatatgctacaatatgtttctcatcaaagccgcacagatttgaggtatgttcccacctcataatcttcagataataagcaatggataatcaaaaacagtgcaaaacaatggcattaaactgcagaaaggcaattcaattatttaaaacagtgacaacaaaaaatgagtagctaaataatcataattttaccaaatgactcttccaacaaaaataaaatatcaagcatgtccttcccagggcatagatttttacgattcacaacacaagctaggatgcactgaggtggttatcccttataattagacaatatgattataaagcgcaaccatgcttactctttcaaaatgaatcctggacaaactgcttcagacaaggtactcagacatttcatagcatgtgcacgtgtcttaatatctgctacacgttcacttagtactaccaatgaaaaacaagatacaaatcagaatagtcattcacaaagtaaacatatcactgatacaagattgcattttacaatagtgcgtattattaccaatagctaaattacccacctgaaaggcaaagtactacgtagtactttggaaatttagttgcagttgaacctatatgagtgataacttcaataacctgctgctgaacctgcacaaggaaattacaagcattaggtcccatttataatatcattcctacatttgactacaaatcattaaaataaataattttaaaatacaaaagaaaatatttttgaacctgaacatttttctcgccccatccaggtaaactgcagactaaacgaatcaaaatttctactgattggtcaaggtcctgtaagccctctacttgctgtttcagtgaagaaatggctgcaaaagtctaacttcagcaaccttacttgtcaagcatgtccaaagacaccacaggaaaatcagaaattaaacagactacatcaagtcatccgtgaatatggcaggaccaatttgaatttactgacccaaaaatgcaacaactataatttacaccaaaatatgaaaattcaatttacaatacaaggaaaaataagagcattttactaaacaaattaaacggcaagaacaaactgacctccatatagattggcacatattccttgtgcaccttcgtaataaaacccttgttacttgtttcagtacaaaaagtcacccaggtcaaggttaacgatcgcacaagatgggactttgtttttggcggctgtcttaacatctgcaacagatccaatgtaatacactcaacaagaagcaaacataaaaaaactaatgagaaacagtgataccttaagtagtgaggttaaaagaacaacaccttcagtagcatttcaagtccatcaacttgcttcttaacatctgtacttaagagtctcccatgtaaatcctctctcaaatacttcatcctatcattctgcaaattgcaggcacatttattataattcaatagttatacatagttcaagttatgcatgattattcctcaacaaacagtcccacctcaagaacttgaattttctcaatgcgtgggtcctcaaacttaaaccttcaaaccaccattctctctcgatcttcatgcttgcaagaaaatccatgacagtccaaccacatatttataagattttaaacaacgtttggtatactccagttcagccaacaataagttttttgaatccttgatatttaacaaggcttgagactggagcgctatatcttgaaaatatattgattcagacttggcaccctctgttgccacaactctcttttgagataatgaaacaaatagttagaaatcaaaacaaatcgaaagtacttaaccaaataaaagtcaacatacagaagatatagctcaatttccatggtttaaaacaccattggcagttgatttaccagcctttgcttttgatgttgcacccactgaaactgctctaccataagttcctcaagtggtcatccattgaaaggggcattgaaatcttgcaatttacacactgatgcaaaaacactaccccattcaacaaaataacacagatttacttttgttttaacaagtttccttttcaaagatgtatatatatatatatatatatatcactaggcacaagtatttttcaagcacattggaaaccagaaagatggagttctacagtgtatggcatacctagaatcttaaaaccagtagctagtgtatttaatgcagcattcctagtttcaccatcccgttctgtagtcaaacttgcaacaatttgcaacgactttagctgcccactaatctgtccacataatgcaaggagtaactatcaaggaaaatactgaataggaaaaagaattcattaaaaagcactagtaacaatacctctgcaccatgatgatcaataataaatccaacaagagtggcacattcaattcgagttcggttattctctgagcaaaaaccctctaatatataagggaaacatttagacacagaatatatggcaacaaattgttttgttagctcccgcatttttcttgtactttttcaatgttatgccctaactgcaacattaaaataagaaatgaattgtgacttcctcatctgtaacacccaaggaagtacactagtcaaactagtatctatgtataccaaaaatttgctgaaatcaaccataccatcagaaagattcactggaataacaacatccttaggtgccacaaatattaaagttgctaatataaaccttctctactaggcacagaagaaacactgccccttcagattcggtcaaagagtacccctgtccttcaaagtgtcaagcagttcaggaagaaattccagcacctaagcaattaagaaaagataagactctatcaactaagtatactcctataaattaaattgaataaagttaagactaacagcagacatctccatgacaaggaaggaaaggaaaagaagaaaactgaaatcacaacaaaaacaaaaataaattgaaatttcaagaatatttatcctaagaagaaatcatcatacattttgttccaagaatattgagccttagaactaattcgataaatggtataaaaaatgaaaaagcagaatgcagagtaaccagatcatactgtcattgcagaagaggcaggcttcagcagttgtgttgcctcgataaccaataaaaaaaaatttacatccttctgcaccaagtttagagtccatcaaagcaattgcaatatatggaacctacaggaaaaccatgcaaaggacacagataccaagacaaaagaatgaaataacacaggaccagcacagaacacagaccatttcaaccagatggacagcaaccagccaagcgtctaatgtattcagcacacattctctcatgtgcttcttgttgtcaccaagacatttcaatatatcagacaaaataccctgcaacaaaccatttccagaaatgttcaaacagaaaacagcaaaacagcaccaaatggggggcaaaatacgaaaacagaacagaatcctcttaccttgcttgccttctctgtatccggggcactgagcagtgcaggctttacatcagtaagaagaaaccctttaatctctgcaaggaggaaaaccttagagccttgaaaacaaaattgagagaacaaatcaacgcagaacacccaagaacttaattgatgcatttctagtagcagcattacttgactgcagcccaatttctttaagaaaatcaatttaagtcctgcaaaataggatttacaataaaccatacaaacttccaagttccaacaacaaataaaatatctaaaaattttgtaaattcagataatgcaccttaagctttatatgtgagaaaccaaaatcttcaacagcagaaaccataagcaaaattccctcactaagaaccttggggttcttatgctccttcattatcttgtaaagctacagtaaaattcacagtttttcaaacattatttgataatacaaaattcccacctcaagatcttgaatttactcaatacgtggttcctcaaacttaaaccttcaaaccaccattcgctctcaatcttcctgcttccaagaaaatccagatgacagtccaaccacatatttataagattttaagcaacgtttggtatactccagttcaacgtttggtacttaacaaggcttgagactggaccgctatatcttgaacagatattgatcagacttggcaccctctgttgccacaactctcttttgagatgatgaaacaaatagttagaaatcaaaacaaatttaaaagtacttaaccaaagaaaaatcaacatgcagaagatacagctctatttccatgttttgaaacaccattggcagttgatttcccagcctttgctttcgatgttgcacccactgaaactgttctacctgactcaaatgactctaaagacaaacaaaaaaaaataatatgtaagcacaaattcaccaacattcgcaaagaagaatgaaccaaagaacgtgccttgaaaagctccatatggtttcaacttctcaacaattagcgtcagtgctggtccatgaatgtctttaaccatcttttcaatctaaaaataagtaaacaattccaagattattgatatttcaagaatattaaggaaacaaggaagaaagcagcatttttgtcatacacataccgttgcatatccactaactctcagtatctcatcaatacaaacctgaaagagtgataggtggtgcccgtggtgggtttcaggggaagaatccaacacctctggagcaattaacacgacaataggggtagaaagaaaacaatacttccttcttgaaaaacaatactttagaacaagtcaccttggtcattttctttaataatttcctgcaatatatcttatcaatgcaatcaagaactctgccataaaagatgaatacataatagataaaaccttaccttcaatatcggtccaagcaattatctaaagagtgcgagaaagaagagaaaacataagagaagaaggaagacgcagagaacatgctttctccatgcatgcatgtcaaaagaaaaatcattattctctcatcttcttccctctattagattttttctcttccttcttgaatagaaatcctgaaccataaagcaatgcagaagtgttttgatgaaagtaggactgtggaagaaccagacacaatagcaatgtatttatagattaataaattgaagcgttgttggaaagaaggaaacggtcatatcaaagatctaagaaagaagcactaaacgtgatatttattttgataataatatgatcattaacagataaaaagaaaattgacaaaattaaatattattcttatgactctattatacatcatgttaaaattgtaattaaaaaaattaattttttatctaaatattagcataaatgtagattacatatcatgaatcattttgtaaaataattaaattaaatttatttgataatatatcatgttatatattatatataataaatttgattgtcgtaatgtaataaaaaaatatgaaaaaacaaagaaccacgctcagataacaattctaatttttaaatttatttgtttaagaaattgaagcgtcataacaaaatgacaccaagataacaatagtaaaagaatgtctctagtaagaataagatagtgtcaattaccttccttaattcatgaatcatattcataatgaattataattaacaacatatgaattgttacaaacttaaacatgatattttgataatttacaactttaacactagctcttataaatagaaaagtctttcctagttaaacttttttaacacttaaatactaatatagtaattcgaagatttaattgacatttagttttgtaaatattgaaagacataaaataaccaaatcacacaaattgatagtgttgtttggttgagaggttcgaggaggaggaggtaaaagaggcaatatgacaatgtggaagtgctaaaagtccaaatgaatctagctttaaattcattaaggctttttggcatatcttgaaggaggacatcatgaggtttatggaagaatttcatagagtttgggtttttccaagaggctcaaattcatcattcataggtctaatccctaaggttgacgacccacaaggccttggggagtttagacctatctccctagtaggatgtatgtacaagatcatggcaaaagtgttacctagaccttgaagaaagtacttaatgatgttattgatcaaatgcaaaagtgtcttctttgacaaagatttcttctacatagtgttttggtggctattgaggtggtgggagaagctaaaaggaaaaacaaaagttgtttggtcttcaaggtggattatcaaaaaacctatgattcagtgaattgggatttcttgctttacatgcttcaaagattgggttttaatgaaaagcggattaggtgttgtttgcaatcttctataatgtcggtattagtgaatgatagcccttcaagagagtttgggatgcaaaggggattgagacaaggcgatccattgacaccatttcttttcacaattgtggcggaaggtcttagtggtcttataagtgaggcggttgcataaaagttctattctagttataaggtgggggtcaattttctacaatatgtggatgatactattttcttaggagaaacatctatgaaaaatatcttgatcataaaaagcattatgagatgctttgaattggtttcgggactcaaagtgaaattccataagagcagttttggagccattagagtggaggagaggatgggattgagatttgctcaaatcttgatttgtagattactatctctaccattcacttatctaggggtacctaatgggggggcaaccctagaagattggagacatggagattggtcatcaacaaattcaaaaagaagttagcctcttggaaacataaggtcctctcttttgcaagaaggttgtgcttactcaatttggtattgacttcattacccttattctttttttaaaaaaataattccaaaggtggtgttacataagttaatttgcttaaaaaaacattctctgggtggagtggatgggagaaaaaaaaatggctttcttgggataaagtgtgttgtcctaagagtgagggagggctaggagttaaaatattgtcatattaacttactttattgaaaaatggagatggaatttatttcataaccaagattcactatggggaagggtggtgttatcaaaatatagggattggagagggttgttaagtgatgtgagtgacaagttggaatctatatggtggagagatctaaaaaaattgtgtggggttgagtgatttaagatggtttgatgaaggagtagattggaaaatggaaaaaagggataaaataaatttttggtgtgatgcataagagggagagcaaaactttgccaatttatatcccaaactattcctcattttattgcaaaaatttgacaaaattggcaatatgggaaggtgggaaggagagacgtggagatggaaatttagttgatgtaggaattgttttgtctaggaagaggacttgctaagaaagtttcaccaacttgtatcaagtatgggcattgatagcgagcagttggatggttggaggtggaaacgaaatgtggattagtcttattcagtaaagacaacatataatctcattattgggaatgacgggaaccaacagacaaacaaaattgttggtgctatatgaaagtaaatattcctccaaaagtgatcttttttttttggagattatttttgaacaggttggccactttggacaacttaaaaagaaaaatgtgagggtagccatgaataattggttatgcctgatatgcactttggaggaggagacaacactcacattcttttctctttcaaattagcagatttggaaaatggtaaattcatgaggaagctatactacctaccattatcacccgaggagaacttttgacaaaaacacgggtctgcaattctgaatgaaatttatgtatgctattatttttggatgtgtaatttttgatttggaaatttaaaataatttaaaccaaataatcaaacaaatgacgttaacataatcaatacagtatgtaacaaaatggataaaaggttttaatgatcaatgatttaacaattgaattgcttaatagagttttaattagcccaaagatatcaaatggtggattttgctatgaccttggtgcttttccggaaaagtagtcaagtcctctagtccaatcagttttgacaatatcagtttttttttttttacagaacaataatactactagttaatgatgtcattattcaaaaatataaagttctaatcagtccaaagatatctattcgtggattttgtatgaagttaataagtacactcctgacatgatttaactctaaaaataagaaaaagtctaagtgagtggttaaatatttttttctttctaaatgacatatattttgagttgaataaaattattatcaacaataaaacaaatttagtaaatatttaacaaaattatatacgaagactcaaacctaaaattactgattaaattatgataattacattttagttcatcaatgcgtttaattagtgataattaatttattttacattattcaagagattctcgaaaatatttttagagttatccctttacgagctacatatgaatagattatatagattacaaattcattattattgtttataatgtcattgagtgcatgttattgcatttaattattgtcattttaataaccatctcaattacatcaataacacaagggcacaattggctgctaacggatactttccttcattgtgtatttatatacagattaaggtgtaccttttaagagaaacattttaattaaacgattaaggcaaaaaatatattatcaccataattattagtagcatgttttttttttcttcctggatttaataaaagctatgatactaatagttattctaatatttctttttaaccaaaaaaactcacttattggtcataacccttttcattggtttacacaaaagaagaaagaaatattttatggaagaaaccaaaaggttaagaatgaaaaaaagggtgattagggtggtggttgcaaagtttgtgtgttggatatgaaaaaatatctctctcccaatggatgaaaggattaattggagagaagtgagaacaaagacagagaagaaaagggtttagtaaacgaaagcgtgagagtgttgtgcgctggaataggtagagagtgatggaaaaagattggtgggtatgcattataaaaaacatgcaccttctatattgcccgcactaacacattaaatgcaccaaagccacattttggatcactacactacaccccagtcgatgtgggacctttccatcttctccccatagccaagccaacacccaactcatcaacatcattgccttctctgaattatctcccactcttcccttttctgtcaccaaaagccatgtccccgttcacatttgataatcataatacttaaccactagattggactcaaaccatgttattttttttcctcctttgcacaacttcttgtttgattttgttgtgtgtatcccttcctcgctcctaaatctaagccatgtttcttgaggagtgagataacaaacacaaaaaatagtaaaagaaaaaaaaaagttttggcttttgtgatggggtgttgatagaggagctagctggtgctgcagggtgtgtttggattttgtataatgggtaattgctggtgtaggtggaatcatcagagtatagagtctcatccaatgtaaagtcaggttggtttactaacaaaaaacttgcctttctctgttttggatgtttttcaattatttatcattgcctggaacgagtaagtgtttttggtttgtgatttgttgagagttttgattagactccttgttttcctccttctggattctgttttcagctcttgaaaatggtttattcatctccttcttttctttttcaatattttgtctttgatgggtgttattctcaaggatttcatgttttggagctttccaatgttccctccttaattgctttcttaatcaccctttcatctggttctttttcattgaagattttctgtttgtgatattatatcatttgaatctagctactggaactttgatatgtaatattattagcttcaaatagctcatccttgtaggcaagttgatattctgcaaatcattgaaagacaaagagaacaaaaaaaacagaaatcttcatataggagttacatgttgtcttcaatcaaatattttttttataacttttctaaagttacttcattgtagaatctgttaatatgacccctaatcaccttttccttatgtgtctgcttcaaaagtgggtcggcttgtaattctcacgtggatagtggaaagcctcttcacaataatgcgttgagtattatcttaactaaatttctaagaaaattagtggtgggtttttaaatataataatccgctgcttcacgattataatatattcccaccatcttatgctttggaaagtgtactatctttcttctctttatccaatacgagagaagaagtttatgtataaatttttttatttatagatagtgaacttattgataattttgtgtataacattccaataaattaactgattaatgcaacatctggttagtttttctgaaaaattggatgaatatatatgaatgggaataattattctcataactttcagagtttcattaaatgtgcatatcatttgttctcatttctcttattgattcaccaaaagaacaaaaccagggaaccaaacaaaggcatgatgatagtaagttaccatcgaatcctgaagaagtagaagatctacggcgtgactcagctgcaaatcctttgatagcattcacttatgatgagttaaagataatcacagcaaattttaggccagatcgtgtgttggggggaggaggattcggaagtgtttacaaagggtttatttctgaggagttaaggcaagggcttcctacccttgctgtagctgttaaagttcatgatggtgacaacagtcatcaagggcacagagaatggctggtacactttttgttgcctttctgtacattttttttatagatgataagtctttctatggaagcgtgctaaatctgcaagacttgagagtgtgtattggatactcttaatttacaaggagatatacaaaaagtatctttttggatggggggaatacccatgtcgcttcaacttctggactgtgaagttccccctccattgtctttctgaacattgtttcgtatgaagttgtctaactgtaaagtcatgatgttgcttcacatgctatgtttattctactatttggcacacataagttaatgtgacaacaaaaatatatcgttggtttaaaaattgttgtaagattaataaaattaaggttttggttgcttcataggcagaagtcatatttttggggcagctttctcatccaaatctagtcaagttaattggatattgctgtgaagacgaacatagggtgctaatatatgagtacatgtcccgaggaagtgtggaacacaacttgttctcaagtaagtatatcttgccacttgttcttgatattgaaattaaagcttaggacaattgctaatgcatgtatccatggctagctaggaatctatttaaagatctcatagcaaaaaatgttaactgttttgctttagtagatgcatatgcatctatatttactttttacttaattacccctttatgttgtctccgacaatgctgacacttaaaagaaaggaatttaagataaagtgattttggttccattttgtagcttcgtggaaaaataccgagttaggaagttttgggcttaagacgttggttctttgtcacttcctaagacatgtgctttagatggatttgataaggacataagtttgacagtaacattacataaggagataacatgtttttgctatactacatacaacctttagtgatcatacttgatgtcaatgttaaaaaagactatgactattaaccctcaacattcctttcacttttgcgatttaatccgtaaaaacgaagaaattacaccggcaactctatgattttttcatattgcatatggtatttttattttttttaatgtttacagcgattttaataaagacacacgatgtaatattttaaaataattatgaaagttagtataatatattgaaaatgtcagtgtgatactttctaaacataagatattagtgtagagattagaaaaaaaatgagacatcaagtgtaatatgaaaatatctcaagaatacacacttttgtggaagatcttggggaaggatctttataagaagatctctttttttcagatccatcattaaaaaaaaaacttatcttcacgtggagatccaggtcttccctaaaaattctagagatctacactaagttcaaaaaaaataattttttatgtgacagggtgaaaaaaataaaataaaatgaaattaaaattaaaataattacttaaaattaattatatgttttattaatattcatatatttttttcttatttattaattaaaattaattatttaattaatattttaaatatttaaaatgtgatccatgtgagattcattaaaattatctaaaattcaatttagaatctatcaataaagaaaaaaaaaatataatctttaatcctaaataacattatagaatctaataaaaaatgatctaaataaaatttcaatttaagataggtcgtgagcaattgagagatttctgaatgtaaattcttggtaggtcctacaccattgtccaatgcaatgagccgaggagtatttttgttctcggaagaccacttactgttttaattttaagccagctactaacttttccagttctagttttaccatgttttccgaactttttcactgtagattaattaatgtttgggttaccattttttgggttactgaggttgacctttaaaacaagggtattcgtgtgggctggaatcccttattttgtataagcccatttagacataaaagtcatgaacttttttgttttgtttttgagaataacaaccatcatcaacttaatattgcccggtgttgaaaaaaaaaacttgctacttatcacatgagtcacctcttatgactagaggatttatatatatatatatatatatatatataattttattttattagagctgctagggcctaacaggtcccactaatcaagtggtgtctaaagaattccaaccagccatgggagaggaaaagatgaatgagaaaaggtttatttacattaaaaaagaatatttctttcatccctcttgtgaagtatgaaatgaattgaatagagatagaaagaaaaacaaggtagaaaaagtaagagatatgcgatatattgaatactgtaataaagaaattaaaagaggaataaaaaattaaaaaataaaatgaaagaaatagtgaaaaaaaaggtttgctaaacccactttatgtgataggttgtcgtatttgcttcacattaattagaccatttttcatgggaatgaaacgcgcttgctggattgatgggtcatttaggagaattcgttaaagcatcattggtaattcctgtaattataatgcatattataaataatttatatctttttatacattactgagttttgtagccaatagttatttccattggaagtttctatagttagtagggtcatgccattaaacatcaaaccagatcaatctcatccacaatatattaaaataccttgagaagaataaaaaaaaaatgattgaggaattactttggacatagcatagtgctagtgtgtgccacacgagttcataaattatcataggttttttcctcacataagttactattccaaatacctaggtgccggggctccacaaggccagccactctatgtcttatacgtgaggagacaagtcagctagacatgtgactaacaatattagttttagctatgttcaaacacaagaacttcttaatcatgcacggttcatcacattatcttttaaataattaaattattatttgatattataaaaccatattttaaaaaaagtgcattttgttataattcttgcaaactaaaatttgcacaagtcaaataacaaataaagtaattacaataaaccgtgtctaataattaaaagttgttctttaataaatggtaagataatattttacattgaacaacacaatgtatgtcatgtcaattatatggatcaccaacctatttaacttccatcttaacctttaaatttcatgttgaatatatttaatatatattaaatattaatatattacgtacaatctaataaattattatataattaatggactcatatagattattaggatttttcctaaattggacataactctattgaacattgcatatttgatacctcatgatgtaatacttaaacatccaacattaaactctttctctctcaaaccccttatctcaacattccaaaagattagcatgagttatgtttaattagtaaatgaaattatgtaaaaatattgtcttctagcaaaaaaaatgtctatctagtttctctgaatcacacccctccactatgaatacactttagtacttcacttttcagtttcacactcacattctctcagaaatttatggatcatctcatctttcacacgtggaacatcactcaatcagaacgaattctaggtagttgaaaaagggagactccttaacccaacaagataaactattttcaggatttgaatccatgacttcagagtcacatagctgcaaccttattattaatatattaagactcactcttaagtctctaattaaataatgaaagttctagatctttgcaaagaatcacagtgaaaatctcccttaatagctaatggaaaaagcattacacgctttatggattctccaaatattaaatgtttttgttttgcatttgatatttttttttaaagtaattgagatattttaagccgattgtttaagagggttcaacaatattagacttggattctttttgtgtcagaggattattctgttggagaaatatagacgcagagttaatgttgcaaggatcctaccacgattaatcataaagtccactagttatattcaaaactgtttgtatttattcaacaaaagaagagactttaatgtttattattgtctttttggttgtatatctaatgtgtctttcttgaatattgcagaaattttgcttcccatgccatggtccataagaatgaagattgcgtttggcgccgcgaagggacttgcatttcttcatgaagcagagaaacctgtcatctatcgagattttaagacatcaaatattttattggaccaggtcagcacacttaaatatgcaactgaaaatgaaaaaaaaaaaaaatgatatatataacgaaaatgtgtagacactagacagatgaggaattaaatttaaccatttaagcatatatagggaggtgaaaaaaaagtgctttccataatttatttgtttagggtctaatttggatgtaggcagattgttggaatcaaacaatcacacaataatcgagatatgagaaaaaaagaaaaaaattatacagagtttacccacacactcataaaatgcactcagtttacaagaaaatatataagtttaaaaattctaagcacaatagttattcatgagtccaagcccaaattacaaaaataataaaatacgagatcaataatagtactgggcctcgaaaaaaattccgagggcctgccccctagcccccgttgaggagactcctgcatatcttgctgacggcacaatataagccatacccaaaacagtatgattctttggagttacacgctgaaagtaaaggacacaaagctattgatgtttgatgctcaatgctcacaagaaatttagctattaaatattgttgttgaggtcatgttgattattgtgttcttcaatttaaaatatttagactttcataacctttggtgtttatgatttattttatactaaacttattgcaaactatagatactgcttgcagttatgttgtcaaattttttatcatagcaaaacgcacatatgctgctgtttaagacacaagactctcgccagctaactatagatatagataagctttactaacaaattgtagttatgttgacaaatactgtttttttcaaagatgaatgtactattaataattggcattgttttagttatttcgtggttcgcttaagcaatcatgcacaacgaaacagtatttgtcacaagaccaaagcacacaaactagtattttgtgatatctctggttagatttcaggtgttgaagcaaacagcaaaatgtaatttttgcattagtttctactcttgtacagcaaagaccacaatgtttccaaaataagccagctttcaactaaccatcttggccttttatgtttcaaaaacaggactacaatgcaaaactttctgactttggcctcgctaaggatggaccagttggagacaatctcatgtttctactcgagtaatgggaacatatggttatgccgcacctgaatacataatgacaggtaaagtatattctgaagctggagttctgtactcatttgtgaatcaaagttcatattttcactaggcataaattaaggccaatgtagagaaattatggttgccccagatttttgatagagtttaatttttatgcatagtctgtgttaagattctttatattatcaactaataaaaaatcacatgaggtataatttttaaggtaacttatataaaagaataaatctatgattggatgatagacgataatataaaaaccctttaaattaaactcttagtatactacaatttgacatcataattatatgttgtgcaggtcatctgactcctagaagtgatgtttacagttttggtgttgttcttcttgaacttctcactggaagaaaatctttagacaagttaagacctgctagagagcagaaccttgcagaatgggctcttcctttgctgaaggaaaagaagaaatttctaaacattatagatccaaggctggacggtgattatccaattaaagcagttcacaaggctgcaatgcttgcatatcattgcttgaaccgcaacccaaaagcaaggcctctaatgcgagatattgtagactcgttggagcctttgcaggcacacacagaggtccctattggaaaaacattgaccataatcagtgaggttcctgaatctggtttgaaaatgaaagatgatgcaaaatgacttaaagagggtgttgttgtaggttatcagtttcacttctcatgttcactgggggagaggttttgccttaacttcttgtgtttattaacatgacatataggcaatttctttctattttatccccttctttgcttttcaacatggttgtcatatatgtacagctggattattgtataaaccgatatcaagttaaacagaaacaaacaagcaatagcagcaatacaggatatgattagacgttcttctgtttcagaaaaaatattttatgcctgagattgtttaagagtttcacactgtttctgaaattgttatgtatggtaaatttattaatttttatataatttaattgaaagtcctatttttttataatttcttatttgacaaagtaatttcttttacagtgcatagaaatgaaactctttctttatttgaatctaatatctttccaatataatgagataaaacagttaatttttttctagccaaaaccttttgaaaatgtccgttatcccaatagttcttgcataaatcagtgaagaacacatgaggctacctagacccgaccagtagaggctaaggaacatgaactgaaacacattttcactgaaatattataaattaaattttgtgtacttttcccactgatatacacttcctaccattttagtttgctgggtaaatttaatcttgaacaatttcttatttttattgttatctgaccaggaatccttgcaaattagactgagtttaacccttaggtcaagtgtgattgtttctgagattaacctcttaattgcggatattgttagcaaaagtcctgtctaaagttgtgttttgggcctatgtctgtggcccatactcaataacaaacatcttggcctagatgggctttgttattcttacccgttcttcgctaacttcacactcttatttacaaatggtgtgacttaacctattttttttttatctttactggaaaaaaaaaagttcatcaatagtaattttgaacaattgctaaaaacatttgttcatgaaattagtaattaaaataatttgttgaattgatattatatttaacaattaattaaaatatcattggttttccaaaacaattttattactattatataaaacaccttttgtcattatttataacatatatagtcaataacttttttgactcttattataagacttgagaagtgttagtaaaacaactttctaacactcatttcatccattatgacttaaaatttattgaaaactataaatgtagagagaaagttattaaataaattgtgagatccatcaaaatttataatttttaataaattttaactaataataaaaatatgctgttagtatttctttataagatttcattttatctctcttatacattaataatttgttgactaaaatatttttatttattttaatctataattaaatgttcatttgaatttttactttctcttttctataaagattaaagaagatgaatagattctgattaatgttaacaataaattttaaaaaatattacagttaaagataaatttaatactaatatctaaattaattaatttttaataaacataatttagacaattatgtagaataaaaagaataagttttattccaatcaagattcttaattattattttttaaaaattttcatctccttaatgaaattgttgatgacttggagttggattgtcatagaggtagtacagccacgtctcaaactcaaactttgcaaaatcgaaaaagtacacgtggcatgatactagtgaactgaatggatgttgcttcttaaatcttaaccacttcagcaatctacgttcacaacctctcatccatgtctttgtggccctaacaaactgttaactatgcacaagcacaacttcaagcaccaaccaagggatgctccactcatagaactcaatatagaaactggaactagaagtagcagtccctaagttttgtgcataaccttaaaccatgtcattgcctaccaccactagtggtcactcatctatttactctgcacttacattgccaagaaccacccaaattcaaccaaccttgttttctcccaccaccaagttcttttcttccagaagcccctcatattcaggtgtttcctattgtttctcaaacacccttttgtcaagacctttgctttttgctgtcaaggcttcatctggggttggctcagaagcatccaaacaggatagtgacaagagtgaagaggaagaggaggaaccgtatgaagagtatgaggtggaaattgagcagccttttggactcaaatttgcaaagggtagagatgggggaacttatattgatgctattgcaccaggaggatcagctgataaggctggagtcttcactgttggggataaagtaattgccaccaggtgtgctattcttgtttttttaatttttctctttctgcaagtttcttatttggagaattagatagaaggtttatagatgtggtataactttgatattcgtggttggatagcatattatgttcaagagagtttattggaggtcttatactcttatttattcttggttggtttatggttgtgaattttgatgagtttaacttttatgcacagttagtgtaaaaattttacaatgttactaattagaaattaagtatgacttttataatatttatcataaaagtcaacaaacttatcatatatatgaatatatcagtttgtgattggatgacccttttcaatatgactttatttagtaacaacaagaagaaaagtctaatcccattaggtgagtgatccatgttttggtatatcaacatgttttacattggctcccaagggcctaacacaaccttcttcctttacttggtcttgggacttgttatgaaaccattagcgtcatttcatactttcagtttaactttggtccttaaaaataattttgacatgtcatagaatcaaggtttctgaatggtctataaattatcctatgtatattatatttggggtggtggtgatggttgggggggggggggggggtcggtctttttatatgtatgaagtgaacttcaaaatccttttgagaagtaaacttgtatactttatgtttgattcataatgtctgagatatgtccaatatcttcaatatctgcagtgcggtttttgggaccgaaatttggccagcagctgaatatggaaggacaatgtacacaattcgccaaagaattggcccattactcatgaaaatgcagaagagatatggtcagttcaatatgtatgcatttttgctatgtttcgagtgctactctagtaagtagtcacttgtgacctttgctcattgatctcagagtcatggttccttattttgacaggaaagagcattgattctggtggtgagttaactgaaaaggaaattatcagagctgagaggaactctgggtttatcagtaacagagtgagagaaattcaagtaagtttcatcatgatgataaaactgcaaaattgtagtccatacattcattctcaaaccattttgtatataatattttctctactatagaaagatgtcactgctgtacttccatgtggggtacaaacatccattatcaattctcaaacttgcaaaattttcagatgctaaatgctttgaggaaaagggaacagaaagagaacagggaaaaggatttgagggaaggattacaactatataagtaagacttagcaactcaaaatcattttctttttgaccctctatgatgtgcccagtattcatttcattgtccaactttgcaattatattcttccgaagggagtagtaggtgaggtatgagaagagttaatcttgattcttgaccatggaactatatttagctataatcagatataagtaaaaccaatatttgatcagcaacgcatgattggttatatggtcaagattagcttcttttacctttcacactctcacttgatacaccttatatatatatatatatatatatatatatatataatcttcaaggttgtgctagatttattaaatttttcctttaggctaattactcacgtggtttcttaattttattttaggttgcgatttggtcccttatttactaaaactaacactagtcgtttttcaattttggggcatcattttgtagttttttttattgattcaagacgtgaaacttatctcattagattcacttacgtgaaaactatgggtcattcagaccaaaaaggacataaataagatgaaattgcatgaaaagtgtgtcttatgaggatctggaaaactgaaaatctccaaagatcaaccagaagattgctcatgagacataaacataatgaaaatcacatgaaaaaatttcaaaatcgtgtcccaaaattgaaaatgataagtgtgctacaacattatttgaaaaggataaatgttgatccctccattatttgaaaaggagggatcaacttactccaagagtaactctttccttatcctcaccattcattttcagtcatttgtctaactgattgaaaccatccatgcttatggccaaaaactggttaaagaaaatacttgcttcactttccaagcatccaatttgcatcatatctaaattaaaagactgactagaattgatgctatctcactactgataagtgataatactactgtgcactctgttcctggattaaatgctgaaggaatggcaaatatgatgaagcactagagaaatttgagtctattttaggatcaaagccagaacctgaggaagcagcagttgcaagttacaatgttgcttgttgttactctaagctaaaccaggtatttgtttccttccgttcgctacttggaacatgtaatttgatcttggattagttccttattatccttgcggaatagatataatccctttacatctgaatgtaactaatttagtccagtaaataaataaaaggtttattagtccttattagaactagctaaatttttcctataacatccaatatctagttttacacctgctaggttaggtgatacaccgaagtcctatagcattgaccaatcccaaacaaaacctgtgaaaattaagtctcctgtttatcttacatttccccatgtagagattagtagctttcttgtagtcattggattttcaacaacaagcatctgattcctcaattttattttttgattcaaagggaggagtggaactctggtaccaagagatttataataactcacacacattgctcaaccaataagctaaaccaccattggttatttttattaattttaaagcattgaaattggtatgagtattatatgcccatatttatattaataaggacaatatacttcttaattaatccattagtcttgccaacaaatgattctataatttatctatctattaatatactaatagagtaataaatatctcttaacagattcaagctgcactttcttcactagaagaagctctgaatgctggttttgaagacttcacggtaatcaacctacttcaagttattccattatcatattggctaagcatctaacattcttgcaattttaacagagaataagaactgatcctgacctggctaacgcaagggcgtcagaggaatttgatcctttattgaaaagatttgatgaatctttcatcaatgagaatgccatcaatgccattaaatctctttttggatttggtaagaaataacccattgtgtggacaaaagcatacagtttggctgactaaggagttggttgagcaatatgataattatttcccatgtataactttatagtttaactacacagtccctcattttttgtcccttaagcgggatcttgttttatgtactagtataatcaagcaaaattataagaaacttatttatgatcaataaaattgtccatttccatcacctcctactttgttgcatgttgtttcccacaaatggccccctaaagaacctgatttgttttgaagcaaccaggtatatatgagaggcttgaatcaagaggatttgcttgttacatgtcatggacattgtcctcttagttcatatagttgcgatttacgaagcaatcctgggcatgacttgagttaaagataatgcagcttgtgattctcaaaatctttaacatctatcttgatgaaatggcactaactccctctttcttttgatgaaactactcatttttttatgatgtttcatgtagctgtttttcaaccatcaatagatacctttctataaattgcaattttttatatttttttactgttttcaacttttaattcgttcacaaaatttcctttgtttctaaaattttacataaacattttcatattttataaatggattgcaattaaatctctatagtgcaaaaatttaaaattattaaatatttatactacaaatttttttgaaataatatgggagtaacaccaaagataaactaacataacaaagttgtaggttttaccaattggattattttctcttatttgattttggacttgaatttcaatgtctcgtttctctatcgcaatgacgattagctccataacagtgattattgaaaccaatacttcgttgaactcatggaagcagatacaaaaagctggggctaatcaatggagcataaagtttattttctaatgctaatatagtaatataagatgactacttagaaaacttctaaacaatatattatgcgtatgaaggtatttgactagaaatgggaaggatgaagtcgaattcaagtccttttactggttctagcaagggatcatacttaaacttctcatcaggaatcaccaaatcccacttgaaccgtttcacgatattatgcatgaacacaagaatctctagttagcaaactcttgccccaaacacattcgggggccacctccaaatggaacatatgaaaatggtgtaggccctgccccttcaaaccttgaagcatcaaaagtttcgggatttgagaagagtgtcatatcctcgtgtgaagaaccggtgttccaatgcaactgcgagaacagatcaacatgagacaaggttctctccttgtagcgaacatgcacttgttttactggtcttatatttgtaaaaagagaaattatcaccaacaattagtattgttgagtctcaaaaaaacaaggaagttttggtctatttaacaaagaaacctcgagtagttcatggaaacaagaacagcaaaaaaagatataaaaaagatttcaaagattgaaataaggttaaattaaacatcaactgaattagtggcctaatttaaaaatattgttggctgatgtaagaaaagaatattaataattgacagcaagaagacaagttttaaaagtacactatagactgtaactagtctctttagctttgatgttccattgtgtgacagtaatatcttaatggtacatatgaaaatacaaatttgaagcgtgagtatgaagtaaagttaaagatggggtagcatttggctatctgcaatcataaacgagatattcccaagtccaaggtatgatatgaaaacacttcatgaccaaggtgtgatttcaatgaatgcagagtgaagaaagcatgataatagtataaaagcattacaaaagaaatgaaacataccttccaccctttagggatgttataatcagcatatgtgaaatcctttgtagcttctctgtaagcaccactaacaggtggggacagcctcatgcttcagatgcaacattccaagagtatttcatttctgaacatcttcccattgcaacaattgctctgcctctttcccttgactaatttcaagttgttctgtcataaagataacttcaacatttaccctgatcaagttttaggtaagagcatatggctgaaaattaaaggatttattactaacctttcaagacatgttcataaacttgaggtaatgtccaagatacttcatgaccaatgataacactgatctagaactatcgtggccggcaaaaagtagaagaagtatgttatcaataacctccatttcggtcataaaccttccattgggatcagatgtaacaagcatgtgtgatagaaggtcttgagtaggtgatgccctcttctcctccaaatccactttccttttctttaaaatcattttaatttccttccttattacatctgcagctttcattgcacgatgaaaccttgtccaggaatgttgaggggcaggccaatgatccctttcagaaattcatcaaattttaacgaaagctttgatatatggtcagagtcttcaatgcttaaaaataagcaacaagccaattcaaacgtgtatagctgtacgacgggatagacaaacacctgctcctttccttcaaaattgcaaagtaagaaaatagtattcaactttgagaaaataggctatgcattgacattgtaaagtaatcacaatccatcatatatgacaagtttgtgatttttataataactaccttaaaatcataccaacagtgatttcatattggttgatcatgctatttttttttcatttctgatgaataaccagttttattagtcaaaacaaaataatatactcaatcaacactgtttaatcatcagaaaacatgtaaaacaggtgtccctcttaggactacttctgatctaagaggttataaatctaataatttatttctttatttcaggatgaatatgaaaagcagaattgagtataaggcccttctgtaactatttgctaatgctaaatcattatgtacctaccgactaacccttaatcatatatacagttgcaagtgttggatttaacccaaatttcattgaagattgttattgatagttttctataatatcgatacatatgtaagatttgtgtaacagataaatatatgtgagatttgatagatatgtaaaaggtatgggatatattagaaagatatgagagatttgaaaaatatgtaagagtctattagagatttattttaataggaaattgggtaagttttgataataaatttgactcttctcatctatggcaataggcaagttgggcttgaccactataaattgtttatgatttgtttgtgatgcttttacccactcactagtagttatgtaagcatatgaaaagaggatatgatatttcccaaggatatggtattccccaccaccaaggatggaagaagggccacaaagaacaaggtattatttaagtaccattagtaaatagaatttagctgttatataacatttcttaccttcccaatatgtgtctatatgacgctgagcaatgctatccatttttggcaagtagtttctgagtgtttctgcattaagaaagctcatgagcaaccttctcaccatctttgcctcatcaccaaccttattaaccaaggacaaccttcacaacctcctcaccgaactaggccaccacacttggacattcttgttctcattgctgaataggaacttgttcccagctggcccgcaaaacacaacaacaggatctccaaacattgaagtcttgaacaccctggagtcatatttcttcactctttcttgtatgaaccttaacacgtttccctcattcattgtacgcagaaactccaaggtttctccaacaacaggccatcctaatcttccaggaggaagattgaggtttggatgtttcctgagtctgtcagctttagtgatgaaatgaagagaaaggacaaagaatgccgaaactgctggcaagactacaaggttggtcacctccataagatttagtgcccttaagaccttaactattgatgaaggacacaagacaacggagagtatgaaagactattctgggaaccagggaaactaaggtgtaagatggatgacagagagattgctctttggggactgaatgaaccagataagatatataaatggaatttaattttcatatagtatctatgtaaaattgtaaatgtaacactggaataaatagaaatcatttttaattgtttgagtaattataataaaagttaataaacttttttttcttggaaaaaagtttcacatatccgaaagttataacactaataccagaaaagtagaatattagttaagaaataatttttctctccacaaatattactctatttacattgtaaaatataagtcaataaatttactaacttagcatacatatgactttgtcataagaatctatatagtgatgatatttgtctcctgtttttataatttgacccacctcaattttaagttgtcataattttttttatcttttattgactagtttcttttttatattttgtttcttttatgctttatttgattgaacattttattttatagaatgagatatgttttttgttctttaaaattttagaaattcaattttaatcttttaaaaaaaatatccattttgcattcttttaattttgaaatacatcactatttttctttaaactggtttagatatatagcgctttgaagataaaaaatattttaaaatagaaagacgagacaaattcttttagaaaatctaaaatagaacttttagacaaattataagaaacttatttatgataaataaaattctgcatatccatcactttctactttgttgcgtattgtttccttcagatggccccaagaagatcgaacctgatttgtttttcgatgaaggggattgtccttattgcatgtcatggactattgtccttagtccccatcgttacgaagcaatcctgggcatgacttgagttatatttatgcagcttgtatttattatttctaggttgtgattcccaaaatctttacttatcttgatgaaatcgctctagcttcccctttcttttgatgaaactaaatttttttattatgtttttcacgtagctgtttttcaaccatcaacagttacctttttataaatttgtcaaaaatatttttttattgaatacaacttttaattcgtcatacaaaattccctttgtttctaataaaaaacattttcatattttgaatggatttcaattaaatctctattagagcaaaaatttaaaattataaaatatttagactacaatttttttaaaataatattggagtaacaccaaaaaaatagcataacaaagttataacttttattaattggattatttcaaattagggctctcttagcattcaacttgagcacaatttggatttgaaagcaagaccaacagtaactcctgttttaaaaaaaaaaaaatcccatgacaaacaagaaaatatatttgtctcctttgcgtaaaactcttctatacttggttctaagattcaattgtgtgaattggtttgtctaggttgtgcaacgtgcaattttggtcttttatcagtttttcgttaactatttaatgtttttttttttttgttgaggactgatatagcagatgatatcacatgtgaaaggaaaataatttgtcaaagcactaaagtagagatggagttttacaataaaaatagacatgaagaggggggaaataacataaaaaagcattacgttttcctggtgtagttttgcagacaaaagtattgcctcatattctttaggaattcatctgattttcttattgattttgtacttgaattttaatatctcgtctcgcaaccacgattaactccaaaaaactagcatcaagaaagcatagacatttgttcaaaaaaaaaaaaagaaaaaagaaagaaagcatagacatgaactatgtaagctgtacataacagaataatcaaaggtttattgaaaccaacacatatcatagaattcatggaagcagttacaaaatgctgctaatcgatgtagcagaaagttttattcaaatactaataatattgcaatataagatgactacttagaaagcttctaatcaaatgttatataagataactacttagaaaacttctaatctatgtattatgcgtatgatgaaggtgtttgactagaaatgggaaggatgaagtcgaattgcaagtccttttactggttctagcatgggatcatacttgaacttctcatcaggaataaccaaatcccacttgaaccgtttcacgatattatgcatgaacacaagtatctctagtctagcaaactcttgccccaaacacattcgggggccacctccaaatggaacatatgaaaagggtgtaggccctgccccttcaaaccttgaagaatcaaaagtttcgggattcgagaagagtgttgggtccttgtgtgatgaaccagtgttccaatgcagctgtcaaaaaagatcatatatgacatgatcaactcgagacaaggttctctcctaggatactagcacctcttttacccttttactgtatattatatttgtaaagaagcaatgcttttcagaattttgtcaccaacaatcgttacttacttcagtattttttagcctcaaaagaatgaaggctggtttcggtctagtgtaacataagaaacatcaaatagttcatagaaacaacaactgaaaaagaagaaaaaaaagataacagagacttaaaagattgaaacaacagttaaattaaacatcaactgaatttgttgcttgatttaaaatattgttggtcgatataagaacagaatactaacaatcgaaagtaatatgacaagttttaaaagtatagactgtaatgtaactagtccctttagccttgatgttgttacagtaagatcttaacgatacatgaaaatacaaatttgaagcgtgtgtatgaagttaaaaaggggtagcatttggctatttgaaatcataaacgagatattttcctaagtccaaggtgtgatatgaaaatacttcatgaccatggtgtgattccaatgaatgcagagtgaaaaaagcaagatagtagtaaaaaagcataacaaaagatatgaaacataccttccaccctttagggatgttataatcagcatagttgaaatcctttatagcttctctgtaagcaccactcacaggtggggacagcctcatgacttcagatgcaacattccaagagtatttcattttctgaacatcttcccattgcaacaattgccctgcctctttcccttgactaatttcaagttgttctgtcataaagataacttcaacatttatcctgatctagttttaggtaagagtatattgctgaaaattaaaggcgtgaaaatagttgtcagcaatagcttgctacaacaattttctttatactacaacaaagtaaacaaacatgttcaaggattttattactaaccttccaagacatgttcataaacttgaggcaattgtccaagatattcatgaccaatgataacactgatctagaagtatcgtgaccggcaaaaagtagaagaagaatgttatcaacaatctccatttcagtcataaaccttccactggggtcagatgtaacaatcatatgtgatagaaggtcctgagtaggtgtaccctcttctcctccaaatccactttccttttctttagaatagttttaatttctttccttattacatctgcagctttcattgcccgataaaaccttgttccaggaacgttgaggggaaaaccaatgatccctttcagaaattcatcaaattttaacgaaagctttgatatatggtcagagtcttcaatgcttaaaaataagcaacaagccaattcaaacgtgtatagttgtactattggataacaaacacctgctcctgtccttcaaaattgcaaagtaacaaaagtattaattattaaactattgatcacaagtattctttttctttttcatttctaatttataaccagtgctattaatcaaaacaaaataatatagttaatcaacaatgtttaatcatcagaaaacttgtcaaacaggtggccctcttaattctttaagactattctgagctcagagaacataaatttaatgattttttatttcaggatgaatgtgaaacaaaagtttctagttgtataagaaccttatgtacctgcccgctagtattggatttaacccaaatttcgttgaagattgttattgatagtttgctatactatcgatacatatgtaagatttgtttcacagactgaatatatgtgagatttgagagatatgaaaaagtatgggagatatttgaaatatatgagagatttgaaaatatgcaggagtcctattagatgagagcagttgggaaaaagatatcaatttcccttccagacctgttatgaatggtcttgtacaagcaaaatgctttatacacaaacagtaattatgcaagcaacacaacacaattttaacgtggaaaaccttctccatgtgagaaataaaaatcacgggaccgatctcggtgtccacccaaattcttcactatcaataaagtgagattacaaaatggttccaacaaccattacaatcaacagacaacttcaacaaaagttgtaccaaaccgtcacaagaggcaaacatacaaaataggcttttgtacgaaattaatttctcctaccagaacaacaacaaacaaatcccaacggtcaaactgacatattgcaagagaggaacacactgatcaaatttgaggacaatccaacggttaatgtgagagaaatgtcccttacaataaaactgcccgcttcagaaaacggtttcataaccgcttcggtttgggaatttccggttatactacaagcctttattcacgaaaccaaccgttagatgttaatattggtgagtcacgaacctgtttaaaaaatttcaccaagatccaacggttaaccaaggagatagagaagattgaaggatgacagtttctacccttctccatatgcgaatttggtggtttctttctcctctcttttctctctttggtttcaaattaactgtcaacatttgaaagaagtaactgttgacctattaaataaggaactccaatctttccttattggctggacttgattgcaacaaatttctttgaagattgttattgatagtttgctatactatcatacatatgtaagatttgtttcacagatgaatatatgtgagatttgagagatatgaaaaaggtatgagagatatttgaaatatatgagagatttgaaaaatatgcaggagtcctattagagatttgttttaataggaaattaggcaagttttgtaaggatgggtcatgagaatgaaaataagagtgagggagagattgcattgcaataaattctacaagctagatttgtttggattatagcagttttctgctccacacttgactacccagcgtttaccgtgggcaccataagtggcaaaccagaggtgtgtccttccctgtcctctcaatgctctaatgcccacaccagatatggacctgactcaatttgattcttctcatctatggaagtaggcaagttgggctggagcactataaattgtttatgatttgtttgtgatgcttttacccacccactagtagttatgtaaccatgtgaagcaaggataaaatatttcccaataatgttgaagaggatgtggtattccccaccaagattgaagaagggccacttagagtaagttacctctatctctatcaatcttttgcttgatcattgattcataaatttaatcaacaaggtgttatttaaccatcatttagtattgatctaattggaagtcgttggtagcacaattctcatatgacctacccaacacagtttagctgttatgtaacatttcttaccttcccaatatgtatctatatggcgctgagcaatgctatccatttttggcaaatagtttctgagtgtttctgcattaagaaagctcatgagcaaccttctcaccatctttgcctcatcaccaaccttattaaccagggacaaccttaatagcttccttactgaattaggccaccagacttgaacattcttgttctcattgctaaatagaaacttgttcccaactggcccgcaaaacacaacaacaggatctccaaacattgaagttttgaacaccctggagtcatatttctcctttctctcttgtatgaaccttaacacgttgccctcattcattgtacgcagaaactccaaggtttctccaacaacaggccatcctaatcttccaggaggaagattgaggtttggatgtttcctgagtctgaaaactttagtgatgaaatacagacaaaggacaaagaatgccaaaactgctggcaagactacaaggttggtcccctccataagatttagtgtccttaagaccttaactattgatgaagagcacaagacaccagagagtatgaaagacaactctgggaaccaggaaaactgtggtgtaagatggatgaaagacagaaagagtttgctctttggaataggactgaaccagagaagttcaagttatataacttaaaagcacttgaactgtgaactacaattcagtttatgttcatctggtttttgttttaaagcaaaatagttggtcctccaattacaaaacatgaaagtgacacttcaatattaatgtatctttccctgttgctccaatgaaaattagtccttgatggcatcactataacgaccattaaggactaaattgaatatttacttaacattttgtatcgtacccttttgctccaatgaaaatcaatcaagaggaataaagcttaagaaagtaaacattgtattaccgaagttgtacatatggatacaactagtgaaccgacgaatggaagcactaaaataaatgggaggaaaggcttagtgggatacatgataaaccatggcatcgtcaaagatactaatctctttgttgggacgatatttagccttgtaccataacatttgtgacctgcggcattgccattattagacacttggtcagatgaaagctatgccataagtccataacaaaccttgtggctgttaaatagccacttcagtgtttgtggccttttgagattattttctcgttttgaaatgacaaaatgataatgtttttgtctatcacttcccctctcttctgttccgctgatgaagttctgtcatgtcatgtggaatggttaacttctatctatactgatgataagataatatttttgtgattaaaaagaaaagtaaaaaataaaatcagagagtttttattaaatagtaaatgaaggcttagaaacaagaaattattaggtggttcataccatcacctcatccatgatttcaaccaataatcatgtgacactagataattgattaagattctttaaattaagggatagtacaattaattcttgttaggtaattaatgagtatatctttaatttatttaatatattttttattgtccatatgtcacatgattattaattagaaccatggacgacatgatggtcctgaaccacttaataatttttcgaaactagaatacatcttgagtatattgacgataataacctaacttgtcttgtcatgctagtatttgcaagttacatacgtagaataaatattgcaagatgataattgtcgaaaaaggacacatgacattgctggattggtttctttattttttttgtcataactcttcgatttactagggaaaatggatcccgactattccagtcagtcaataattattttcgccaaaaattgaattcgaatactacttgaaagattcaaccttaactttaccacattaaccacttatgtttaatcacttcattaattgatttctttgtttgataaaaaataaagaaatagaatggatgaaaataaaaagggaaaaaaaaggtgaaatataaagtaaatttgattaaacaaaaataaagaaaagatcgagataaacatgagtatatatatatattagattatgtcttacaaggtacaacaatgataattttaataaatagatgataataatattattttaaatttaacttaagtttgtatacattgaaccctaaaaaagttatgttgtgtgttcaaaattttaaacaaattcataattatgtttttaaatatgttaaattttaaatcttaagtgtacaaacttagagattatgaattatttatatttttaatacggataatgagaatcaactagtgatttatgagtcagtttttaacccgttaatttagaaatctcatcaaatcaaatgattcattcgagtctcataacattgacagtaattatacatggtatgtttataggtgcgtgctataacatgtaaatgagtgcacaacaacgtacccttgagctgaatatcctttaattttacgtggtgacccaagatgaatgccttaatcgcatgaaagtgcataacccacccacacgtacagaaaatgggaaggagattttgtgattcatgataaccccacccacgtgtcccatttattaaaggaaatatccttgtccatactgaacctatggaagcgtaagtgacgaacccaggtcagattgattggtagagtaaagatacgttggctagattgtgttggctctatcctcgtttggctagaattttaattcaatcatccatcatggttgtttaatacgataaatgaagtggatgacaaatgtttcaatccacaaattattttatgatctcgttttttctcgaacgcattgatcgagttacaacatactagtacttacattttagtctctagtgtcacgttcaatctcatctacttctattaattcaaagtccatttaactaataagtcactacataaatgttatttcacgttcccttatgactttatagttgtcaaatatcttataaaaccatcagcgtgaattcaagtctggcataaaaaaactatatataaatattaatgtttgcttttagtcgttcatgatcatttttgcttgtctttattcgagtatctttatattttcaaattgaaatattccatctctttgaagatattgaaattgctctaaatagagctatttttattttaataatcaaattagagtctttggactttttagtaatattctaaaatatttctacaaaattctattgtttagattaattatgcgactaattttcaaaactttgttatgcttaaaacttttaatgatatcttacatgaaaattgaatctaaatctctttcataaaactcagcttatattattaacggagtcatattcatttggtagtgttattatagttttagtatataaatatgagacagacaaatacatgtacaccttaacaagtgaagttttctacaacgtgaatttaatttaattctgaaacaacggattcttatcaataaaatgtttgcccaataaaatcatattcccagaagttatggacctcagcctcatacagttggctctgataagagattagtggaaggactaatggacgaatcaagtggtgacaaagttgatggtttcgttttgaaaacatgtactgttgaacatttgaaacttctgtggttgagattatccaagacaaattgtatcgcatttgtctactcctacatcatcattgtgaggacacatgacgttcacaattggagaagctttagtgaactctctctaatttagaaatatgccatttttagcaacaattctgtgcagactcactattcaaggcctccatcgtttgagttttatttcttgccaaaacactaattttataaccaatgtatttaaaaataattattgtttgagttttataaccaaaacactattcaaggcctcgatcgtttgagttttattttgttaaagtattctagagtgagaggtcatggaaaataaattatttaagagggagtaaattggtatacaagctcctacaagattacttcaaaagaagaaaacctgggaacaagatctaaaaaaatcttataatttgtgtatacatataaatggatttgaagataaccaacgaaagttttcacaagcagccataattttttataacaaaaaaatgctgggcagagatgtttatgagtttctttgggtatgcataattaagcatgattcaattaacacaagcgggaatcaattgttctgcctctcactatatataaagcgtgcaaatggaattatttaaaatttcaggaaatttaaaatttagaaaattaaaatgcatcaattaaaattttttattttcaaattctgtgtttggataaaaattaaatttcttcatttcaaaattttgtttgcataaagaaattgatttttttcgttttaaattttgaatctcattcacgaaaaacacgtaaaatagtgtcatgagagtagagaggtcggagtattcgtccgagatcaagatgaacaaaagtggtgcagttagagctttagagaattcaatttctcacctttagaaggaaattcaaatttcacattttagttgtttaaaattctatttaaaattccaaaaatttaaattctcgtataaaatattaaacaatgaatttatattaaaaatttcaaattccctgataaattactttttccaattaaattctctatccaaacatactgtaagaaaagaagtaaatcattttgaatcgaggattgtgtcaatgattaaaaagatgcaacaacaaaaatccataatattcaagattgcaaacacaatatcatataaggaaattcaaatagaagcaatacatgttaatcggggagctatatatatctatgaatgattagtactattcaatttgtttttgaggtctatagaatatggaacctttgccttgcaattgtttgcatcccatacggcatgcattttggcactctgaatctgctgcaaatttaatcttcatgcatatcttcatgcatttaccgaaacatgtcgttacgggtatcttgccacgttcaacttcgtgacctgttgctgaatctactaccaccaccaccaatggcatgtatagaaccaagataaccgccaaacctaaggatttgtaaaccattgtattgtatttgcggtgtgccaaagaaatgcaaatgtatcgaaatgtatgtaaaatggaaatttccttggaatgttgcgtgtgtgtggtgaaaaatcgatcaattggttgactttgttctaaattgggtttaggaatttgttttccaaaattaaaaattataggaatttggaatcacgagcacggtaaagaagttgtatagtactcaaagaagattaatcatcgccactccaaataataataataatttattattattataagaagataaaccattaacttggtaaaaaaaacaaataatatagaattcaatacaataatttatttaattacatatgagagaatatattgaacgacatacagttgttaaacataaccaccacatagcaatgaaacagttaaataaaaaaactcgtcattctaaaaggttctattttaattaacaattaaaacaatggataaataattaaatttttctaagcagcactcataaattaattcctgaaaaaatgacaaattcaaagttagtattcgaacatataaaaaatacaataaattagttttgcagataatctaataataaagtggtttctaaaattataacttaatatcaaattaatcctcaaaaaatataattatttatcaaattgatcgttaaacattataatctaataaaaaattgtttcacaaatttaacaatagaactaatttatcacattttttcacattcagggactaaatttgtatttttatcttgcagtaaccaatttatcattacatcacactttgagaactaatttcaacatttacccttaaaacattcataatattcttattgattaattatataagtatttaatagcatcaaatttggaatcaaggaaaagaagattataagtgacatttattgggatgaataatagggtgctcatgaattgaattgaatcgattttaaagagaaaaatcattcaatttaaataatttagttttgttaatttatcatttaattagtttaatttaaacttttaattagatctaatttaaagcaatttggattagaacaattttttattttaatcctttttctaattttttcagaaagtactaaataaaatgtgagatatatatttaaaatggcaaatattttatgtaactaataataaagtatttatgtattttaactcaaataattagtaaaaaaatctttaattaaatacattttttataaatagatataaattatataataattttataaatttatgagatataaaaataagtgatattataaatttacgaataaaaacatataaattttaattaattgcggtgaacgtggatgaaacacgtgaccttcagatcttcagtctcaaactatcccaactgagctatacccacttttaaaatattatttggttaagagttaatataactataataattcataaatcatcttacaaccataaagattatccaaaaatataaaaaaataacataaacaaaaacgtaagttgcgagattcatttcgtccacgggagaagtaagtggagttatccaccctttcatttctctctttacaatatattgacccttttttagttttagttacttatatataataatagtataaacagtaaaacttaaatgggtacgcctttaaaatttgaaaaagtcttgctttgacatattaaaacaaactattatgtataatcatttttttataataattatattaaaatttatacctgtgttgattttttattagtgtatagtggtcaatttcaaaataaaaaattgttacgtaagtattagagtgttcataaaacattcaaattaacacattgttagtttgagtataactgaatttaatttttttaaatgagattttaagtttaagtcttatgaactaaataaaaaattgatttaaagaaggatgttgctaaggatggttactcaagttttctgataaaaattagttatcaattttaatttgaattgacttggatgaaatttaaatgttaaattaaacaaattagataatgaattaaagaaaattgatatgactatataattggtttattttcttagaaaaattgattctatctatttcagagacttccctatcggtaaatcctatccataacaagagaattggagtgaaaagagaaaataataattatgacaagtgatgcgatgaaaattgaagagataaaaaaaaatgaatttgggtagaatgagatggaagaaaaatatgttgatttacgctattaaaatatacatgcaagtaaaagatttaaattaataatttttatagttattaaaaaattcaaatatacatactcatacattttgtttatctcatgttatattaaagaggttttttattttatttttgttacaatatttgataattatttatgactatttttacatttagacaaatcataccaaacaaataacataaattaaatagtacacttcaattttattatgtataaatcatgttgtaattgtgtatatttcattattaataaatattacacaaatgttcatttccattaaataaagacaacaacattcaatataaaattgtgacattagatggacactaaaaaaaattcaagtaaaatttgttactttttgtaattgtttatatctattttctcacatggacaaatcacaagttaaatattatgcttgatatattaattttgttataattttacatatttcaaatgcattctaagtaaatattgttcaatagttcattttcattaaataaaaacaacctcatttgtgataaaattgtgtcattaattgatattaaaaaaaagtgaaatttttcactctttaacaattgtttatatttattttcacacttaggttaatcattttaagtgaataacacaggtaaaataaacagttcgattttattatgaatgtttatgcacttaaatattatatttaatgtattaattctattatgattttgcatatttcaaatatgtttttagtaaatattatccaattttattaaataaataaatatatttaaaataaaattattacattagttaaataaataaaaagtataagttgttatattatttgacagacgtctatatttattttacagtttaatgaaaaataaaattcaaataaaaaggcacaaatcatatgattaaaaaatctatttattgaattgtttgagagataattataatcacttcatcaaaactaaatcatcaatcatcaattgttttccaacccctagagatgttgaagccaggccatcctcaatgtcatcctttgaccgcagaacctacaaatcacaaatatcatcagagaacaggattgtatagtctttatagataattttaactcttatattatagatagttttattttcgtgtaattatgaataaatatagtcaacaattctcttcttttaccgattctgaaataaattttatcaagaaataaactaatcttataactcataacttaacaatcaagattttactctttttattacatctcatacattatttcaaaaaaattgaatgaaatatataattatgttttctttaaaaaaatatatagttattaatcaacaattatatgtacatttttaaccctaacgtgcggccattgagactggtcaagtccatggagaagaaagaaatgcgaagagtaaacccggaggaggagataagaagtgagtaggtaggtcaaattttgcacatgttgagatgatagagagaagggaaagaggaataatcgagaatcgagatggtgttgagagtggcacgtgtctctgctcaagcgtggcagtgccttgcggagcctgagcctctgagcagtgagcagatattggatctgctttgctgtttccctctccatcaactcgctttctctctctactcctttttctgcgctcctcactccaattattcctatttcccttctcactccgactccgactctcaccgcgatcattcttccgatttcgattactattaccaatcctattcagactgaaaccaaaccatattaggtactattgcccattcaaatttctccaacaatgcttttattcaaattccatccttattgttaaattatgttgaaactcttttctaagcctgatcttcttgtcatttatgatttatgctgtaagaggaatcattttactagagaggaaggaacatctacatatttatgacttttatttttgctggagtgagttacaaatgtttctattaataattacggaaacgaattgctcattgtcttgagagtatcattcctcatctcagaataagggaataccaaacataataagaggagtgagactttcattcatttttccattactattcccatcaagcaaagccattccaatgaaccaaaagttagctaattggttcgtacagaaattcacagaatgccatttccacactagtgttgtcatcacaagagttgctatggttcgaaatgttatccaataacctgcattatgtattcaccttgattcattactcaatagatctaagttcttgtgactactcctgcagttaaacaaattttgacaagttgccagaaattttgagtttatatattaggaaatcctgcttaaatttcttcaatgaaatgttgtgttcttttgggaatttagattataagaaggattttttgctttgtatttgtccaaattctgggataatttgctgcgagttattgtcgttagactctttattatgtctctgctgactatgctttatgcccttttgacaggaatttgcctgctgaagtgatgtattgatagactttgggtggtaagaacgagatcctcaattgcagtctctggtttctcagtcagttccttatctgaggatgaaagcttttttcttttttttttcgaggactttagtagtgttcaagctgcctccattgtataaaagcatcttttatacttagattttgtggttgattgattgatctcttcacattttatacccttgtaaagagtgatttgtgagtggtaatatataattttaaactgcccttgaaagggagttttgtgatataagttacttcaaaactgaactttgtatagtatatagtatataccttcaatcatcacatatttctgaaatttttttttatacttttttctttcctttaacatgaggtcgttggagctcatttgctcatgaaggtaaataatcaatggtagcagtaccagaattcaaaactaggatgtgcagtattcctctcaagtgtttttggtccgaagaaagatgactattattctcaagattttgaatggaaggaaaaatgagagggcaagattttcttcctttcatttttgtctcctctccaatattagtatcaggataatctggaggatgttgacaaaattattctcaagattttagtaaaaaattatgtcttttaagattttagtaaaaaaattattctcctacttacatacaatattgtggtcatataacgtaagatctccatatataccagatcggggaaatgagatagtaaatgatgtgaattttattaatcacatcaccacttatgagaaattgaacaattttttttagaaagaacaaaacaaaatagatactatattatatagggataaaaaaaacttattaagagtattgaatttgactatgtaaaaagttattgactttgtcttataaataagattagtgtaaataattttttgtctagaccacaagtatttttcgttagagacaatgctatttaagtcaggtgtttaatatggacgtaaaattttctctctaattatttaacacaactgcattcctttcattagataaattaatttatttaatgaaattatttttgatacatatagttatatatctaaatctgaatagttaaaatatatggaatttgtattgattaattataatgataagttatttagatgatatgaaaatattttttttatcggtttgagtcttttagaagatgtaaaattggaaagtggaagatttaggatacaaatatttaattttatgttctgattttttggttgaatattaaatatattataaagattatatcttttggtaaaagtatattataatcatgaaatttccttcaaacaatatatattaatatgacatataatcagttttatttggtaacgtcaaatcatgatgaattggtaagtcataacatcgagaaaactcaaatggttgaaatacatatcttaatataataatgaggacataaattattggctaaattactgtccataatctgcaaattccagggcccaaaaggataaattaatgttgttcttgattgaggctcttactactatttgatttagtcattaatatcattattatttctgattacatttttcctccaatagtgcatgtactcttatagaatatataaattctcatcctttgtccacttttcacttcacaagcaccttctagctagctccatttagattatttgataactaaagtatagtagtatcatttttttttttttatctcaaagatgaaggtcatacttgccgtccttctaaactttgttattacttcatctaacttgtgtactagagtaaggcctgaggcaagtcccagcttcaatgttgttagctacggtgccaagggggatggcaaaagtgatgattcacaggtatatttttcctagtttcatataattgtctttataaatgaggctatatatatatatatatatatatatatatatatatatgatgctacattaaacctatttggcaatacttgtaaaggcttttgtgaaagcatggcaagacgtgtgtggtgcaactcaggagactgcaacacttgacataccgggggaaaaacattcatgttgcaacctgtgttgtttcagggtccttgcaaaccagcaaccattaacattgaggtaaatcatagtaaatgaattacttacagtacatataaatctgtgaatatatgcatatgccttaattcagccatatatatgcttattaaagtttttaattagcacatcttcaatggtgcaattatggtaaaattgcttaattcacttttaatgtgtcttacaatgttaggccttaattgatcagccaatatatatatgcttattaaagtcattaattagcacatcttcagacttcaatggtgcaattatggtaaaattaattgcttatctcatgcactcttagtgtgtcttacaatgttatttaagagctttcaacatccaatggtacaagaacataaaatgaattctacagttattaatttcacagttgtttgtataagaacttttacatcaatgttacttaaattctattggaaacggtttcataatatatatatatatatatatatgtatatgaatatatgatattctttattaattaatcctcatttgaatcgcagcttgaggggactatcattgccccagaaagcgttggcgcttggaaatggccaaatggcgataggaaatggatccaattctcgaacataaatggccttgtaatcaatggaggacaaggaggacaatttgatggccaaggtgatgcatggtggaatgatgtctctaataggcccactgtacgttgaaaattagtaaaatcatgacttaattactcttcttcaaattcttcataccccaaaatcgaatattaatttcattcattcaaatacatatgtgcatgcaggctcttcaattccataactgtggaaatctaagtcttagcgccacgactcacatcaacagcccaagaaatcatataagcttagatatgtgcaatggcgtaatcatttccaatattcgtatcattgcaccaatgcagagtccaaacaccgacgggatagatatctcagcatcatccaacatcttaatacagaattccaccattaaaaccggtgatgactgcattgccattatttccggttcgtccttgatcaacataagtcgtattttttgtggacctggtcatggcataaggtgggtttagttcaagtcaatttccagcttattatcaagtatatataacatgaattaagaaatttagtttaattgattaaatagagtatgtgagtgttatattctttgatatttcctttaatgataaatccaacagatttttttttcaataggggcaaaaaaaattataatttttacaaaatacataatatgataacaaaaaaatctaaaatatcaatatttttacaaattataattattctttaatattttcatattttaaaatttttgtatgattttttattgataatactataaaaaatagaaacataaaatataaaattaacaccaatttatctcttataaatatttacgttcatcttaaaaatatcttatgggggtaacttcaattttttatgagggcaaaataaaatttattatacatagacaaataaaaaaaattattatgcgtgggaataattgcccgaataaactactatatggatccgtggttcagtatcttctgttccttcttataagaaaaaaaaaagcgtatatagcatgacctttaactcgtggttaatttggtgaatcctagtgttgggagcctcggacgtaatggagattatgctagagttgaagaggtacgtgtgagtaattgcaccttcagaggaactgaaaatggagtcagaatcaagacatggacggtaacgatatgattgattaattggctctctatctctctctctagctaattgatactactattaatcacaattaatgcatattatgtgttatgtgttagggaggatccggttatgctaggaatatcacatttgaagatattgtagttgtaggggttaagaaccctctgattattaaccaaaattattttgggcttgaagcagaaagtagtggagaaggaaaagcagtgcaaataagccatgttacttaccgaaatgtgaagggaacttctagtgtgaaggatgcagttgtactgaattgtgatcccactgtagggtgcaccgacattgtattggatgatatttgcataaccactgaagatggcatgaaaacacaaggatcatgcaccaatgcacaagggatgtgctctgactgtgatccaattgtctcatgtctttccaacaaagattaatttgtaataaacttccactagtgtcacgtggagatcatccaaatttcttgtctttcaaactattgaaatggcatactgaattttgttgttttttaaaaatttaaaaggctatattataaattaagttcttcctttcttttgaatatataatattcttttctttagttgttgattttttttattcatttatttttataactactataaaagtaatgaaatatatatatatatatatacacacacctgattccatcttttaagaattagaccaaaggttccttatgtaactggtggcatcctccttgggttgcatggatgtatataacagtatgaaaagattgcgtttgttttcttttgttttttttttttttttggaaatcttatactttgcaaatatttgttgctcacttcgtacatcgcaaggaagtgttattctattgtacacggaaaaataatttcatgaaaaaggtatgattggaaattagtaaaaaatcactcacatggatggtgaaaatagcaattgctgatataagaatagcagcgcattagttgggctacttctgtaagtactaataagtccatttatggatgtgactggactcagtccaaccaatgagtaatatttgttttcattgtaggttttttttttttttttttgttctattttagaagttatgtatcttaatttcattttatgaattcatcttcttacttttttatataatgacaaaataaatattactgtaaaattttgtaattttatatttcactattgagcttattttaagttgagagctagtcaggaaaactaaaagaaaaatattaatcgtcctaggaaatgacatacaacgttattcgataatcaacatttaataatattagggcgatgtagagaaccagtgcatgcttcactaaatctaaactaaaccttattaccttcgagttagacagcaaacagataccactaatggcaatggcatgattttaatttttaaataatctaatgaattctgagtttggtttcattctgaggcaatgcaaggaaaggctacgttggattcaaaactctactaggaaatttgttggacaacttgcctattctttcgttagggtgtccagattatatgttggtcaacattgttttcagtttattctaaattgtatttgtgtcattattatgattggaatgataattttgcagtaaaaagaaaatttaaataatatttattcgttatatttatatagacgacagatatttaaataatactactttgttgctgtggatttcctctattttttaagtctactctcttcttcctaactatgagttgtttatttttttacttatttattaaatatatatttctctttaaaaaattaaatatttttctggcaatcatttttacttttaatgtttatgttcaaattttatccaaattacaaaataccttaataatgtttgatatatctaccagtgttattgaaataattttactttatattgaagtttttttttttgcaatgataacaataaagataaaatctaatatttcatgcatattacttaaacttcttttcactaggctggctcactaaaaaatttaaaaaccaataaatcgaaaataggttattattggttcaacacaaaatgtaccatcaaagataaaataaagtattaaccaaaatgattaaaatctaattgaaatttatataatcgatacccaaaacagaacatggaacatgtatgcctgtattcaatgttcatttcgttctctctctttttcatttatattttgtctttttcaactgtttaaactccttttttttgtttacttttatatatgctcttctctttgtaaattttgtttatttgttatttttcagaatttaaaaatgaattggggcaaaatatggaatttagcaaacgctaccatttttcaaagctccattgaccttgattctaaagcagggataatctttgcctgtgatatgggtgagtgatgcaaacgtttccaagggtttagaaccagatccacactcatatagttttatattcttgattaactttatgttggtgatcaagtcgtctatacaaccatatttcgtcaatttgttcacatgaaaagactgatgaaaattgaaaaatgctaatatatatcagtagcgttttgagtgggtaatcttttaaaaatgaagtgatgaaaacgctaatagtattaacgtttttatacacgtagtgtacattgttaatctctgaaatccacgtgttgtccatttgagatatcacaaattaacaatatcctacgtgaacaacatatggtgcagtttatatttagaaaaaaggaaatagataatttctggaaacactccattgactagcgtattctaccgttaatttccaacgtactttaataatacgtttcaaaaaacaatcctaatctgattaaatgtttgtaaagtgaaactataccttactatgatgaaatgatcaatcaaccaaaaacaaaagaaatggaacatactaaaaataaaggcccaattataatagtaatatcacatcccaatgatgcacctcattttctttgttttagttgctattttcagaaattgggtgcgtatttaattcagaatatctttaatttttagaacttcaaagaaaaacatttcagactttatttttttaattacctacatgcttggagagcttttctttgtttttgctctggagtaagaattttttgcgttggtggagtgtgttgtcccaatgtgtgtggatgtgagctaccacaaaaactcccttaaattacggtccaatatccaaattgattcagagaagaaagtaatcctagccaccgcagaaccttcaaaaagcatttggtatcttctatgccttttcaaattcaatgatacaccattaggggaaaaaagtaacgtttaagtcaatcaatcataaaatttatgagtaaatagtttattgtaaaaaaataatattatcattcaattgttaattgtcatatagaattaatggtagtgtatttggtttgcggtttagacgtccatatgagttttacttctcataaaaatcattttatagttgaattaaaatcttaaacgtaatttctattcaaattgaagttaagtttaagttattcttctattattttttcattaaacgtaaaagtttcaaacataaatcaagttatattaaacttttttttactaaattttacaaagttggatcaatcaaatttgggtttctcaattataatccaaacacatactattttaacttttgtgccttgtaatgcatgttttttcaattagttgcactcaactcaactggcgttgaaaaaactattactctcacattgctttggtttttgtgccataaaatgtgttttttcattgaatatgaatttaaacaattaactaaacacacactaagttattgatcttaatcgaaatgagttggaatgcttaagtaaaatttaaatttgagtatagtaaataaaaaaatatggttgaaaagttcaaatttttttaataattttggttatgaaagcaataataatttatcgcaaaacaaaaaagttcatgactttttaacaagtaattcaaataactcataagaaaaatcctacggcaattcaagacatatatatcttcaattaattagaatgtcactctttcaatcattgaagtaactgtgagcataagatttccctcttatccatgataacccgaacatatatctatcgaagtacacattaaaaaatattacaaaattaccaacttatgatagctaatagcttacttatttaatagtacgatagatatatgtcatataaaattattccattgtgcaaagtactgctttaaataacattaacgcaaatagcatatgaggaataaattgtcaacatccaatgtcaagactcaagaacaagaatattgttttcattctctttcgttatgttttcgatagttcattcatttccaaccaaacctaccatatttgctaataatcaagtgatatcccaccttgttgaaatgctttgctactttctcagatctatctaatctatagtacatataaaagaagacaatgcattttgtagtcatcatatagagctgacccattaagcactatgatcacgattccttataaacttttttttttcgacgggtaaaagtaaaacaatagtttgcaaacttaaaaagatgaaaatatgtagaccccaaagaattgttttgatcaaaatttccagcttgtattccttcccttttttcatatggaacatatatactatattcttctctaatactataagttatttcatcctacctttaagctttctaggaccatttgcaaaagtctctcacttgcccaccattataggatcctaaaagcgcaataattcgataaaaaaaaagtcgattttctatcaaaacctttacggccttgctttagtttttatttatttataacatttgtttttgtggttcacattaatattgggatatttgaacgagacataattcatatgaatctgattttactatggagttgtgcaatggaaatgcgtccttcagaagaagaacacgacactgacacgagaacatgctctgtttgcacattctagatgatgctggaaaatcaacgctgcaaatatagttggctatgcataattttaggtttattcattgaaaggcctatctttatatgtgcaataacaaataaagcagatttatatatagaggaatggtgtaaaggaaaatgatgagagttattttaagatagaaataaaaaagagaaaaaagcttaaagaagaaaaggagaaagatagagaaggaaaaatgagcaatcttttgtgtcatagttgtaagaatcaaatccaaccaagattgcatccttattaagtgtgttttgatggtgtagaagaaaaaataataaagaaataaagaaaaaatatttaaattaaaatagaaagaggtgaagaattcacgctatttttaaaaattattcttaaataataattttctcttttcaaccaaatcattcctaaatgaataattcattcgacagcagcataatttaactgatttgtaaggttaggtcagttttaattgttgctagcaaattagtactttatactaaaacaaattagtactactttttatttttaaaaatagcaaaatactacttttcataataagacattcttatgtttgtttgtttttacatgctaaaattatctatagaaaagataatcttatttaagttgaatatcataattataattagtaaatatctctttttaaatgttgctctaaatattttttaattcttgtaatttagttttttttatttttagttcttgtaatattttttttttaattctcataaattatgtttttttcatcattattacattttagataatatgttttcagtgtttaaagcattacttaaaaagaggactaaaaataaaataatataatttataaaaacaaaaaattacaaaaacaaaaaataaaaaacactaaataacaatgaacaaaaatatatttaaatcttaaatattgattaatgtatttgtatattcaggaatcaagcttaaaattatattgactaaaatagaatcattcatgttaattaatttacacgttagatggcaagaattctatttcagatataatttttccaaaaaaacttttaaacattatttactcttaaataggatgagtttactatgacactttctacgacagcaatgaaaatttgttaccagaagttaaaaaaatgttgcctagaatacaacaccgatttttccacatatataaagtgacaatgtggatgtatcaagagaagatatgaataacacttattgaaatttaaataacagtaagtttaagcaacgagtttataacatagacttccatccaatttaataaataacaagttcaagtttgtttcgccagaggattcaagtttttcttcatgtatttcaacaaacaataaaaataaaaatactaagttgctaacccgtcagagttccaataataagatgttttctgttttttataaatagaaatatctagctgaatatttagtatgttaattttgaatcaataactttttttaaggtaattatgaaagaaatatatttagattaaacaaaagagaaaataaatatatatatatgagtatatctcttatttacaataatattacctttagattaatctttaattgttggactaggatatttatttatttagatctcgttaattattatgcacgtggttgagattttctcaattaaaattctaaattaataaatctttaataaaatattttattagattcatatattaggtcaaatatattattaatatatgaaatatgtatcttacaattcaaacgaatgtaatgaaaaacaatatatatatatatgcattatttatctttaattcattcttatttatagctattgtaattttgtaatattaattgattacatctttacatcatattaataattatgccatggacaattttaagccatatgctatattttaacatatagttaaagtgtctcattttttattttatattaatagaggtagtaaaatgaaagtatgtaaaataaataacatgaaagaaaatttcattatcattaaattaataaattaatattttattcataaatttcatacgatataaaaaaattataataattcacccaattaacaaaaattagaacttgttagttcataaaataaatttgatgtattatgctatttttttatatcagagaatggacgttaaggatatttaaaaataaagttctcaatggtggaaaaaatgttctaaataaaatattaaacacgcataacactaatgtttttatcttcccaggacaatcctgtgtcaggtcaaagaccaacattggattccttttaaagattcgaagatccaaccgttgcgtaattcccatttttggattatttttaaaaatttaccattcaataccgtacagaaatggattcagttctgtgatggtcacgggcgcgcctctgagtgtgatgatgagtcgctgtacacgtgtagggtcagtgatgcactttgggtgaatgtgaatgggtctaatcaccctggacatgacgaaatctctctcacttacccttgctactacttctgcactggattatcatatctcaaattttccatgatcttatgttaaattcactttactttttttggattaaaacttcattgactatgattcattcatatcaatattattacattgttctagaccaaattgatcttaaactcattaaataagatcatgagttcaaatttaataaacgttattataaaaatagtcttcattataattagtaagaaaaattctctaactgttattaatattttttatcctatatcaatgatagcggaagtttcttaattcattaaattagagatctatttcaatctagatacataatttttgttgggccaacactttttgtacacataaaaatcaaacataatctgctaaataaatcatttactaattgtggtggaagtgtgtaaccttacaccactaccgaagctctatgggttttaaaatattagtataatgtataataaaaaaatgagaatgacttaataaaaattagtataagttaaaaaaataattgatatttgattaattaattatgttataacatataatatgtttatgtatagttagatgtcaactataaatatttattaataactaatatataaaaaaattaatgtacaattatagataatatatataatagttaaattatattcataaaaaaattgtagatgtctacaagtctttatatacggttatgactatatataaaaagatatgccataaagtttatgtgggttttatcttgttgtctggttctctctctcgagttctgttctgcttattgtgagaaatgttactgttagtgaataagagaaaaatgtttttgtttacaattaaaatagggaaattttaatgttctctttcattttgaaagagattttttttagaagtgtatataaaagaaataaaaggtaaaaataattatatataatgttaaacgtcatataattaattgattttgaaataatagaattattacttggcatgctaaatattcgaggagatttgttcttttatgtttttcctcttaaaaaaataataaaatataatatttttatcctatcatttatatctccttccttctctcttctttttaaaacaacaaagggattagtccttgtcatttttttttacaaaatagattaataacgttttttttccaaaaaatataaaaagattaaaatttcatatatatatatatattataaacataaaaagagatatattgttgtgtatatatatgcatgagggatatgtgccaaaaaaaaatatataaataaatgatcaaattatatcattattattttgactaactattatatcattcattaatttttaattaatatattttagattaaaagttttctatagatcatatatgtaaatttatgtattaatccaaattatttactattttattatgtagattaaaataatttaatatatttttttaaatatattaaaatataataatttgattattttattgattttttttataaattattatgtttaatttaaataaaatttgaacaaaataatatataaatataattcaataattgaatgaataaaatttatattttatatcaagttataaaataatgtaataattatttaagttatattaatataatttaattttttctctcgtgttgtatagtaatatattagtttttaatactcactcttcaaataatataacactgtattgtttactttttgtgtgtttatttttttctttttcccttctcccaaaattttcctacccaaacatagctaaggcatctattatgtcattgaaatagattttgtcgaaacaagcttaaacaaagctgaggcatttattatgtcaatgaaatggattttgtcaaaacaaactaaagtcaattctcgatgctttaatgccagctaaagctgtagtacacacaggacatcgttagtcagttgataaagagcgatgaattcgcgagtgtttggtatatataacttatttttacaaatttatcgacattgttttaaacaatgattgtttcccaaaacaaattaaaaaaatgtgtttttttcagatcattttttttttttctttttaaatttttagataaaatatgttttttgtttattaaatatttcaaaattcaacttaatcatataaaaaattaatgtttcttcagctttacatttcagttcccaataaagtacatggttttagtttatgataagagactaaaactacaccacattttataaatgtagaagttaaaaacttatgaccttaaaattggaatttttttagggataacaacatatttgatcatatttcctaaacaataaaaatatttaacataacaaattactcaaatgagtaatctatagcatttcgtgtttactaattgaagctatatttactattatacttgtgaaggtgtaccggatttcaaaactgaaagaaaaaaaatgttaaatgaaaatgaacccgagtcatattctattcataaagctagtaagtactcagtactcaccacataggttgttagaaagaaattgtgctaaagttatttgagattatgaaactgatttactttattacaagctttaattttattttaacatattttttaatgaaaaatattaaatttataaacaaagtttcatataaccaggggcaaaattagaagaaaaatgttagggggccaaaaaaattaccataggccaaagactaacgaacttaatgcttagggtcaaggtttgtggggacgaatttttattttaattaactataaatgttggaggctttttgatatttgaagaacgactgtccctgtacccttaccctagttctatccctcaatatacagttttttttttttcatttttttttatggaattggtgtttacttaaatagttaatcaaagtgtagaataagtgtggaaatggatcttttacatttcaaaaattaactacacctaatggtattcttatcctattgttttctttatacttataactttttatgatagctgattttgatgattgtagttatttgtagtttaaattttgggatatacatgttataatatgaagtattaataactttaccagtaactaatttttattaaaaaaattgattgattatttttagtaatttttttttcatctttgattatgggattttaattaaatgatatgaacttagtttcatttgaactcatgacatgtttggtttgaaattttgaataattataaaactgcagttgtctgctacaaaattaagttccttcaatagacagatatttaatatttttttaataagtactttcaaaagttcctttaaagattattattttatttaatattataatttaagcacgcgtcaagcctcgattattaatacagtaaatttatatcaatttaaagttaacaatacagtaaataaataaataaaaactttatttataaacctacattctataggacagtggtctgcggatctagaaactagtgctttcgtttgcatagaatatattatcacctgtttaattgtgatcgacttctaagctgaatgaaaatgtaacaaaaattaattaaaaatatttattatataaaaatatataataattatattttttaattatttaaaatcaaccctaaaaactgatgtgtattcctatcatcgcaactattttcttgagatgttatgtctattgggtgatggagaattgcatacaattccttaaaaaatcgaatacgattcaaaaggaaatcatattttagaattggaataaaggaatcattgtctttagattaacactaagataaataaatgaaacacatggccgtggatgcgacgccaagttacacgtgattgtctcagagaattgtgtaattaatatgtgcatacaatatctgcaaaatatttttccatcggattcccttgtgaatgattaaatataacactttttttttttgctgagaaatggacccacttattcatttatcaaatgatgaattgttgattgacattatcctttttgttagagtggaagaataagagtgggtactaattgcagtaatgagccaaaaatataaaatactaattattattttctttaaaactgagcacagcgagaattaagtgacctaaggtgataaaatactgtgataaattaagtcatttaactcattaatttattttaagttttcaacccaccaatttattggattgaaggtgggacaagacgagttattctattcagcctattaacattaataacatattaaaataactttataattttatataattaaaaaagaatgaattataccctaaaaataatggtaatatcatgaaaatgtataaataacatctattgtcttattttcctcataaaaataattgatttagtatcatcataaattaacataaattcactctctattaatccactcttcactaatgggttaacccacctcgcacttatgataagttgaatgtgagtttttttttttttaggaataaataggcttgtgttattcagaacaaataacagaacagtgtacatcttgcactaaacctcttcaagccaataattatctctgggagttttttatagttgtgaatttaagcttaatttaattaaaattggtttataaactaaaattgttttttatttatatattttatcttgatgttattctataatgattttgatatcattttagaattataaattttatttaactcaattttataaaattattttttaaataaaatttattctaacttatatattctattttgattttcagtgtggttaacgtgggatttgagttttatttcactaggttaatttgttttgccaatcataagataatcggacatgtaaataataaaaatagcaattaaatttttaataagtgattttttttcaatgaatgaatctaataataatggaagagtaacggatagtcacggtcagaacttgggacaaaagttgctcctccttttacgcataaaaaggaaatttccagtccttttgttgctaaagaagggaaaaaaaaaaaaagaaaaaatttcatctcaggttgcctgaaaagtgaaacccgtttaaagcaacaagaagtatactgaaaaaaaactcttcggttaaattttataaattaaaaaatcaattaaaaatttaagttaaatattacattatcttattttttattatcaacattttcattatttttatatattcacgcattttaaaagccttttcctttttatttttatttttgaaatgcataggataaaacggtaaaagcggattgggtctggcacagtgccacggacacaaacactgaaacacgattcacagttcacaaattcgcatcagtatctatgtaaacgacaaaattaacacaaatataatatgataggaatgttagataaatcttattttttaagtatgtgattataaatttaattaaattatgtatataaaaatatttattaaaatagattaattttgaatatattattatctccaagattaattcttaatttttggacaatgatatcattcaaaagaaaaaaaataaattaagtatgattattgcttaaaaataacaagaagagtgttcactgtattcatgaaaattataaagcatattcacactcaatctgtctaattttttttttatttttttttttttttttttttttttttattttttttttttttattattataaaaaattacaaaaaataacatttaaaaaaaaaggaaagaagaaggagatgatgatattgttaatttgaaagtgagaggaaaatgacaagaaagagggagctagaaagtgacggtttttgtttaattatttaatgaatcaattattcaatataatatgatgatggaaagtggaagggcgagagagaaaaaaaaagtttttttttaagaaagagggaataaaacaaaagagggttagcttagtatgactgtttggtgtttagtggctgcccttgctttcataggaagtgagaaactaggctagttagtcccattggattttttttttgtggctgaagaaggtgaaaggggggcaagtttcactcttcaagggttttgaaggtgtcaacttgcgttttgagactctgaggttgttgaggttgaggttcaagctgcattttttttgaagggtggggatgggctctagttgtggttgtggtgtgactcttgttcttgttttctgcttatggggcatgttgatctccctctcttctgctgctaggctcagtgctacaaggcagaagcttgaggttgctaagcatttgaatcgcttgaacaagcctcctgttaagaccattcaggtctctctctctctcgttctttctctctctttacttttaactttatgtttgtatgtgtgttttggggtgttcttcatccacccctattttggtgtttcttcttgttttaatctgtttggcacccaatgaaatggtctagttttgtgaagaaaaaaaaagattactttttttttgttttgcccttgtttgctggatgggagatgctactgaaatggttatgtacctttcaaacattttcacttaaaataatccatcttgcaagctgctgctaccgattttttttttttgtaagtattaggtgatttcttttcttctctttgttttataaaatgtagatcttttatgtggatgtgctgatttctcaagccaactaaaatttccctttaattttttttctcctacttacacccctataaaaaaaatatatagcccatttgatgggaactattgattgaattttgaagcagtaagtcagtaactagaaatactgtaagaaagaagtaggcaatgatttgccttttttgtttatttattttccctttctaatcagctactgggttttgagtaatagaaagatattggtttcaatttggtacatagtatttcaaatgttaacaatattatgatgtgattttgtcaatgttgcagagtccagatggggatacaatagactgtgtgcctgtttcgaagcagccagcatttgaccatcctttcctcaaagatcacaagattcaggtccattttcctcactcaagatctatttttctgttctttgtttttcttcatttttatgtaattttttactaacaccatgctttgatttaatagacaaggcctagtttccaccctgaagggctttttgaagagaacaagttatctgaaaagcctaagcaaaaactcatacccccatcactcagctgtggcatgcgaatggtagatgtcctgaggacacaatacccgtcaggagaaccaaggaagaggatgttctgagagcaagttcagtcaaaaggtatggtaggaagaagcacagagcaatccctaagcctaggtcagctgagcctgatctaattaaccaaagtggtcatcaggtaagaactgttttgagtgccttgtattttattaggttttcttgtttcctcttttaagtagtaaccttggtctaatctcctgatggtgtttttgtggggggttgtaatcatcagcatgcaatagcgtatgttgaaggggacaagtattatggagcaaaagccactataaatgtgtgggaacccaagattctgcagcctaatgagttcagcttgtctcagctttggatattaggaggctcatttggtcaagatcttaacagcattgaagctggctggcaggttctaagaaataagaatcactattcatttataccaagtgtgcaatctaagtactgcccttgactctgaattataatgtaaattgtaatgactgttgtgcatgataacaggttagtccagatttatatggtgataacaatacgcggctattcacctactggacggtaagcttgatgtatttttttatgcatggctttgattttttattttaatgtttgtgttatccaatttattattattattttttttatcaaactcacttgctgcattttgcagagtgatgcatatcaagctactggctgctacaatcttctttgctccggatttattcaagttaacagtgaaatagcaatgggtgcaaccatttccccagtttctgcataccgaaactcccagttcgatatcagtatacttatctggaaggtaaaatcccaggaatttcctggtttttaatctgcaaatggaaaccacccgttaagcatcttggggtctcatctcattaatcttccaactaggtgtttggcatgtggaccatggtaatgtcccccctagtgtttggattcttggacacctctatcatctttcaagcatttgtatgaaacatgatatgtggagatccaagcctatgtttgctaattcatagctaatatgggaatcttgagtttttaccgtgttcacttattaactggccagtaaaagctttttttttacctagtatcaatagcattcttcgtggtagtggcaccctagttagaatcatctttatagcacagatccctggtatctcctcccagtttcttttgatcaggatatggaccccaattttaattgatgatggggacactgttaacaattcagccatcaggaactttgaaaagtcatgaattgcttatactcattctataaatgcacagaacacatgttgtattttcaaccttcataccctttttaatttacacacaatgctcttttctgttggtgagctaaacaatatacttttaagtcattaactttgttactggtactaattagttatcttttttctatttttcctccttgtaggatcctaaagagggacactggtggatgcaatttgggaatgaccatgtattgggatattggccttctttcctgttctcatatttggctgacagtgcttccatgatcgagtggggaggtgaagttgtaaattctgagcctgatggtcagcacacatcaactcaaatgggaagtggtcatttccctgaagagggttttggcaaagcaagctacttcaagaacattcaagtggttgatagctccaataatctcaaggctcccaaaggcattggcaccttcactgagcaatcaaactgctatgatgtccaaacaggcagtaatggggattggggccattacttttactatggaggccctggtaaaaatcctaattgtcaatgagtaatgatgagaggaaagttaaaaaaaaaaaaaaaaaaaaatgcaacctctcttgtatcattgaatgctagtgttaaagcccttccttctcttccatcttgtatacccttttttctgtagtggaaagttttgactttttttcttctaatattgaaagattctccatgtaagctagtggagaagtgtggccaagtttctcaaaagcctaaagaccttttataacatctttgtattttatttgtttgtccactcctcctccctctataagagtgtttgtcaatggcaatggagctggtcttttgtgattaccaaaactagaacttattacttactctcaaaatgagtcactaatgttgttccattaattttaactgattattatatggtacctatggctatggccatgctttgaatgaaaaatgagtcaaataaaaaagtgaaaagtactgtgagaccagtgaaagaaaaaatgaaattgtattattattaaactttggacttaaagatgcttgaaaagggttgcatgtcagtggctgacagtatatttgtttgcatttcaacttttttcgtgaaaagtgggcccacttcttccaccctatattttcaatcgctttctccattctgcaaaccatcgttgtattaccattaaagcttgtgaacaagcggtgctaaaagtcgtaggtccagctcctttatatggatttagttttcttgctcgataacaaaaattataattattaattaagagtcactaatattatgtcttaaactaaaaatagaaattttaaactctgaaggattggtttagcagtaaactgatactagcaagttatgcaatggattatgtggagacactttttaaagcttttagttatgtaagttagttggtgttaaattgatactaggtgggtgttaaattgggtattcctgcctcctattttttttttttttgtaaatgttaaattttattaatctaatcagattattacacttactaacttatataaagtgtaatatttataacttgtaaagaattaattactaagttataacaaaaaattatagaagtatgttatgaaaataattaaatatttttttccatgaaacttagtatttttttttttttgtttgttttacaaaatatttttttatttttcgttcttaaacgttttagataatgttttgaataataaaaaaattttaaacagtaaaaaatgttatgtaaaaaatttaagaacaaaaataaaacaaaatattttgtaatgataaaatgaaaaaaattacaatatgaaaatgaaaaaaaatgctaaattgcatagatgaaaaatatacttaaaccaaaaatataatacaaaaaaagtttaatttctagacaatctttgtcattaattttttacataaaattatttaaaaattgaatatgataaatcatcatgttattttttttgaaatagcaggcaattcacatttgtgtcatcatgtatcatgtataggttaaaatataagtatggtccttaattttttttcttcaattgttccttaactttcaaaagttctaaatggtcgtaacttatttaatgaagactctttagtcattctattccttacttctcattttttattttcaaacatgttttgaatcctttattaatttgattcaaaatgtgaatttgttccattagattcatctgcacgaaaactataaaattaactaatgtttaaaaaaagaatcataaacatagtgaaaatcatatgaaaagtgagtcttgtgaacaataaaaaaagaatatgatattaaatttcttctgtttgatacttatgaaactcacttttcatgcaatctttaccttgtttatgtcccttttggttcgcacatgaattgattctcatagttttcatgttaataaataatgaggcaaactttatgccttgaatcaatcaaaaaaaggttcaaaattgtgtccaaaaattgaaaatggtaaattttaaaaagactaacatgtcattaattaaataagtaaggtgatatttttaaaaatttaaaagtttggaaactaatttagcaaaataaataaattaagggagcatttgtatattttatcctcaagtatattaaacaataggttctcagtgactcattggattttcaggtgagttagctctcttttgaagataccaatctgtctcacactcttacatagacttaatacattggttctctccatcttacggccaaatgaactagtatgcgggcttagtttttaaaaaaattacaatctcaaaataaatatttttttctctttaaaaattaattacactcaattatatatatatatattttttttaaaactctcaataaatctttaataaattctaattataaagttttaacacaaccaataaattttcaacataaatgtaaagaaattttgaattgagtttttaggattaattgggtttgattcaacttggtggctgcaagtttgcagtccaactcgcggatcttatggtccaaattcttaaagttcgtgaattatgaaggacggatctaaaattctgcataaccattaattttttaaaaaaatggtccatgactcatgcataccctgagctccacaaaccgattcatagacttgaacctgtttacccatccgcaatggtaacatgcaagctgtagggcgttggcagtaatgagcatggctgcgacccatatcgttcctggcatatatgcttcgctaatctatagaaacacgttgattggacaatgttctgatttctgaccaaagctagtccccaaatctgcacgagacaatgagttaggttacgacctaatctactactcttcaaataataattgatgtaccatatcaagaatgtacccactactagtattaatttgtgaggtattgtatgacttctttgtaaatattcaataaatttgattatgaaatttattttactccacactgttttataagaatccaaaagaattgtcttaactatttgatcgagcgttgcattgagtcaattacatttaattatgagtcaatccttgcaacatgcaaaattttgatcttaactttttcacttttttcgttgtcattttttaatccgtatacatcaaagacatctactagtgattagttaatcaagtgagatactccccaaataaaattagctactttatctctttaaatcttgtacacttttgaggatttgttgcttatttgatatgttttatagagatttgtttaatagtttaacactttgaattagaacatattatacaaattatattaacttatatatatatatatatatatatatattataacatgttatttccatacccatgtaaccggagcagagcctagcctggcagtgacagtggtaggtttacatgtcggtgatggcaagcacaaaactcattgcaaacccagtgatttgtcagcggctcaatttggtgtatggtttaggcattgtttagtgttattggttaatattctgcacaaattttggaaaggggcactgcaatattttctcaatgtgtcaaacaaatgcaatgaaattgaatacgatcagaatcaacattaaaaaaacgtaggatataatttcaaaaacgaaattgctttccagttctgtgttttttttttttttttcctgttacatatgtgcacacagcatgtattggagtgccattaaaacgtatatagatctatagagtatatacaatcttctatcattttccatattttgatgaatagtatggttctgagatggaacctatgtttggaacttgagaaagagagtggaaagaaaaaaaaattaaattgaaatgaaagaaaaaaaattggattcttatttctataagttaactttctttttctttttaatttttcttaattaaaaaaattatatcattattcatgtttttttctctattttttttcttcttatcaaacatattaatagattttctaatatttctaataattaaatttaacagattttgagcgggaatgaaaggttgaagattggacaaaaagttaacaataataaactttaacattgtgactacaaggattaagagtgttcacgggtatggtcaccgtgaatctgaactaatctgaatcgattcgaacagtttgagttggtcatttatgtatttgagtcaaaatcgaatcgagccgaccaaaatcattcatgtacgagttgggtcatggatttagatttatagatcgtgaatccgtaataaaaatataaattttattatatatatatattaaaatttaaaagctaaaattattttgacaataaaaaaaaagtgtggtactgtaaatgtctaggtcgaatgaagggctacccataatctctcatctcatctcatctttactgtgaaggtgtggtactataaatgtgacatgtttaggtttttttttcttttgcgcttatgtgttctgtctcatctcatctcttctttgcagttctgcaccagctccttctctattatctctcatctcatctccttctctattatctctcatctcatctcatcagattgatcaaacatcaagttttattctacgctttctttttcttttctaagctctttaacttctcgtgatttttctggtttgtattcattgagattttgatggaaacagggatgagaagaaaataaataacttcattgttgaatgttgactcgaatttttggttatagcaaagtttattacaagaaattaatttgtaagaaatagttgtgattcagactattataataaattttgttcaaaaatcttttgttttaatttatattataagtctattttagaacattatgttgattgtattaaatgaatcatttttactattttcatacatttgataatattgtgttaattgtattggatatttgaaaaatcatgatataaaataatagtttaaaggaaaaatttaaatgcataacccgttgacccgaaccgttcatgaatgggttggattgaatttaaaaaaaatcctgaaaatcgaatagatcaaatttaattagattagatcttaaatttaactaaaactaatctgaactaatccgcagacaccctatgaatgtttagcctaatctttgtgacaagggaatattctagccgaacacgagaaatttaggtaatgtttacgtaaagattttaatattcaactcagtgcatacattacatgatacaagagataaaagttagacaacacctccattcctatggaatctatttatattatttctccttcgcctattgtggcatttcctcatcaataatggtgtgacaattgcctcactaagcaaatagtacaaagatttattaattggatttggatcatgataaattatttacattatattgtaattcgtccatgatccaaaaggttcttaatgaggtgcataggaggtttgattatcaatcctagtttattgggtcaactaaaaaaaaacaattatcatttgtcaataattaaaacaatcctaaatttattggatcaactcattggctcattttttgtatgtgatgtgtccacctcttcaaatagggatcaagaacaattatccccaaatcaatgggcttggttataatcgttcttctaataagtttaaggttttttcttagatttcatcttattttagataagatagactcttctgttttttcgactctagacttctaaaagtttttttgtttttttgtttgttttaggatttgacagtgtgaatgtgcatttgttttgatggttgctttctcttaacgtttttggtttttgtccaggtttcttctttttatattgcctatctttctttctatcattcttgttttcaattttttttagttgagctgggttttgatcatccttttcattttgctagcttttactctgcttctatgtttggttaataaaagaaagtgaaaggaaataaaatgagaagagaagagagtgaaaaaaaaagatatttacccattcaacatctttagttataacttaaatttagattttttttcaaatcaaactatcattaattaaaaataacaatctattaaaacataaattattcatcataaatctagaatataatttacgtgttaaaatatttatttactataaaattaattataatgtaatttatatatttagaaatatttatttattataaattaaaaaattcatttcataaattaaatatttattatgttattctgtgctctggttgcttataaacaacatgtggtgagacccatgaacctagctatatctcagctcattgttcaaatttcatttctacttgcatattttggatcaaaagtactacaaccatatttcactaacttagtctcaacttcaaggctacctccttgtggtttaaagtttccttgaactcacgtttcttatttacaatacgacatcattgtattgactaggacttttccatgctctttttgggtaaatttaatgattttaaacgtttttgtatttaattgtgtatatgattaaaattaaaactattttgaataacttctcatcaaatcattaattttactttaaatgtattttttttttctgattgatggtaaacaaaccaaagtaaatcagtaagtaagaacccaaaatgactcgagaaaaaaaaatatatcgacaaaaagtataaaaaaaagtcataaaaaatgtaaaaacaaaatgatcataataaaataaaacttattttcgaatttcgacagcaatgtaaagcagcatagtactccattattagaaccttgtaaagcaccaactatagagactcttcatcagtaaacatcaaaatgagtttctaataaatttccgacaggactcgtattgagaatcaatagtagtatttttcttctttttttttttttttgctgaatagaagtcaattagttgttgtaaaaaggaaaagaaaaacgaaaagagaaaaaaaaaaaccatgaagtagatgtacaaaatgctacacattaacaagtaaaaaaactgtacaaaaagcaaaaatcttagaaagaatgtaatgaaataaagcaatcataaagagggaaactcaccttcaatgtatattaactaaaaggattccaaattaataatgaaaaacttcatattgaaatagcacaactaatcaatatgagataaagaacattagataataataaaaaataaaaaatatgactgatctgtttagggaaagtggaagcctggagaatataaaacattagctagagatataatctaaaaaagaagaaaaaaatgcgattatataaagctgtagtaggatatgaattaatgacagagaaagagaaagaagacaagaatgttttacaataatgttttggaacagtggaatacaataaaatgaaagtaaaagaaaaataaaaatcataagtataaaggaaggttaaacattttgtagaaaatcaaatgcacgagaagagaacatgtgctatttcttaacaaagcataaactatatttgatagaagttttttttgcggaagatattttatagaagttatggatagttaaataaatctgtggtttaaataaaattgaatgtttgatcagataatatttctttggcagcggattagataatattgaaagcttaatactccatttattatttttgaaggagaaagcttaatactcctaacaaataacaatagatttttttttttttttttttataaatcgacgttgacaaattctagtcaaatcataatttttttttgaggatctagtcaaatcataatcaataccagtgtatttaaagaaataattaattatagcatccttaaaaataaaacctaggacaggagcatctttaaataaacaaaaaaaaattcttcgattaatatctataataatagaatgataaagaaataggaatctgggagtctcaatgattaagaagagttggatttaaaaaatcaacgagttagaaaaaaaaaaaaaaagcatatgaattaagaattactgttgacggccaccctcttgatttcgtgggcaaacatttgtttttcctttttaattttcatcttctatctcagtgtttgtttgtttgtttaattttttgatttttaaatgttccaagagaccaagacacaatcacgggaagtaaatgaatgcatagccaccaagaatgtaaagaatttcatttaaaatgtcaaattccaaacttttaatcaagtcactattatattattgactttctcagccaatatcttagcttattttttaaggaagcaacaacgtttaaaaaatattaaaacttttattataataataacacaagaattatttagcaaggagtacctttttttatgttaatgatattcaatattttaatcaatatttttagaagaattaactaaaatacattaaaagcataaaaagaaagtaccattatagtaaatttgttattctataataataaatatcttaaatattatacttaggatgatttttgataagatataatgcaatttttttatattaacagtatatgaagattaacattttctttaaatattcgctaaaaattcttattttatttaatataagttgacaatatatttcttaatccattatttctaacatatttttattattaataaataaaatttaagtacattatttaaatgtcatgctcttattttccatataatgaattttatctattttaaaaaaaaatataaatgccgaaaaagagttgaaaagtgagtcgctgctggtccagaaaaaactgttaaaataaataaaaagtctcaaaccggtaatataaaaacgttaaagcaattctttctgcacattatttgtctttactttctctctcatacgtagaggagagagaaaaagagagaatttaattttatgtttacttgatatagttgacagaggctgagccaagagaagaagaagggtgggtgtagtagggtttcaatcttcattcttcactaatccttttatacaatccgagtgtgtgtaagaaagagagacccgaacaaattcacaaacccttcttctctctttttttcttctttcaatttcaattttcttgttactattactaaccctagcttccttgaacactcactttgaaaccctagctgcttcagccatggctcatttcagctgaattcgccactatgttgctgccatttcaattcacaacagcgaggtaagttcaaaacccgttcgttccgtttcggcattctcatgcaccgtcgcaattaacgctgttttgtttttctttggctgtaatcaggtgcatgcgcgttgtttgagtggaggagggacaggcatggaccgtgcgcttctcctcgcgtgcgtgatttgcgggatcctcttctcggtgttgggcttggcgtcgttcttcatcctttgggctgtgaattggaggccctggcgaatttataggtatctcgtcaagattctgtgtttctgtttacctgtttttcacttggtgctttgggtttgtttgtagttttaagattaaattgccatgctgcaatgttaatgctgttgattttttgtggcgcatatggattctgttgctaaaaattagtagttgttttaaagtattttataatttgatatttactggcattggctgctgtgtactgtcgctgaattgcataactaattagctacatttgtttaacaacttgggaattaagtgtgaaccattcgggtgctttttctgtttttatgatggtctgctaagtatggtggttttgtgccgtttttgaactgtgtgagccggtaacttgggaattctgtacacgaggttgatgcttcctagtcctgagtgctttgctttcttttactttgcactccttttttaagtaatttggtcggaattcacatgatgatgcatttcagtaacgccttaagggctagtgtttttagtgaatgtatcacacataggatggtgccaaatgtaagatgagaagtctaacatttaaacattcaatgtgatgtacttatggacattgtaggaaataaccttttttttttatctattaatcaatgtgtttgttttaaacttaaaaaaagaaactttataataagtgcttttttaagaagcagataggatttgcctcttaaaaaaagcagaaaactgcttattttaagtacaagcagtttatacaattacatcagaaaaacagaaatctacttattttaattgaatttcctttgtttccttaaacctaaaccctaaacctaacctaaccctaaacctaaacctaaacctaacctaaacctaaaccctaaaccctagaaaaaaggacgatttggatagagttgtggaaattctcatgaaacttgtagtcatatatattaggtttacaatttagtatatctgttggaatcttaattaacagtggtctgaatttgaagaaatgattacctggtttaatgaatataaatataaaaaaattgagattacacatctgtatggttcatatatgtgatttgtattaattgagttgctaatcaaggagataatagattcataatcttcagtaggcctttgattatttcattgagttgctcctatgataaaactgtatcaccaattgcatttagatcgtcaattagggattggattcaaaggtgatactaaaaaatagttcaatcttaaagcattgtgcttggaagttctgtgtgaagtttctgacctccacattcttgtgaaattgaaaggagtgaattttatcccataattgcccagagctttttcatctgattactcaagcaatcatattgtcagaaatagacgattgtaaccaagagagaagcaactggtcttgttactctgatgtgatatagatttcagaaatgtgatttgccccacattcttcatgtgtgcggaattatgatggaattactgtattggcgagaaagtggtgaagatgacagccttggattattggttcaacttgctggcactgaagtagataatttttcaaatcattttctaggaaacagagtgacaaaatataactgcggatgatgccagagaagatcccatggaggagagaggtgttgatggaggatgcaatctcagtggcaagcatgaattggttgttcagaggccatcttgggttcgagcaaagctctcgaagtcatgataaagttgtgaggaagagaaaatgaacactgaaccataaatttataattctgtaaaatgaaaggctatacatagcaccctgggctggcttcagctcatcaagatatcctataggaatgggtacaatcatattacagagagtgagagagttacattactctaatatagatacacctttaaagaagaaacctttgaagctaataagaaaaggatgtctcataaaagttgagttggaattatgttctagcagatagcaccagatttcttttgtgtgtatattatttgttctattattaaaaagaatttcttagctctttagtgttattatactattattattggatagaaagaaagaaatatgaatttattattgtcttgcaggacaaggctagaataggtaaacagagcaaaaataaaagtaaaaattgacatctaggatttttcctactttgtttcacatgagtctctaatctctatatacatgttctgaaaattgggtaatttcacttcttgtgttgatgtggtctgttgtgattaattttaaaatatttgatgaatccacagtgatagaaactgcattcttgaacataacacataatgttgctctgggcctcttgactgtatttcaggaacaaataagttcaagttttgctacataactttctatgttatctcatatgttttgagaagaaatacaagttgtttttatgctgctttgtcatgctgataaaaaatgctgctttgtcatgctgataaaaaatgctgctttgtcatgcatttaaagtactctgaattttggaacattgttttgggcttcttgcatctatttttatttatttgtttctatttcagttggatctttgctcggaaatggccaaatatcttgcaaggtcctcaactccatttgctctgtggtttcctgaatctttctgcatggatagttgttatttctccaattctggtgcttatcatttggggctcttggttgattgtaatattgggtcgagacctgattggtttggctgtaataatggctggcactgctcttctattggcattttattcaattatgctgtggtggagaactcagtggcaaagctcaagtatgtattttccggcctattttttatttaacaaaacatattttgtgtcgtgttcacagttattaagcttatatattctattaatctattcaatatgaaacccaaatttctaaatactgtatcttaggtagagactgtttctggtattattactgttgtggattgttttctgtcgatgatcttccatcatttgagcaattgacagcctttggatgtgatgattatgtcttctgtttcatgaaaaagtgaacagaagagagaagaactgtaactgctgtcatgtatgactcttccattgttaaaattatgatattctcattataaaaatggaacaaattgcgcaggctttactggattcagtgcaaacctggttcccaaaaaaaatggtcaaaaaggttgctggacatgttggttagtggtcataaagttgccaaaaaattgagaacaactgggaactacagcagggtgaaagtattggatgccaaacaaagaagttcctcagttgagaaattgactaaaaataataacttgatcatgtttataggagatggtattgccttggttagtgaaaagaagtaaaatagaacaagattgattgaataatatataagattagattgatatggcgtgttttacttctaacacaaaaatggcgctaatattgtaaaacttactaacaacactcatagcaaatcagaaggtaaacagttggattatcaataggtctaggtctagcattcaacatgcatgtttcctttatatgtctaaggcgtactggcagtggcggatctaggaccttggaccagtggggcaatttatttaaaaataaaaattgataattgtcattattatatggaatagttggattcaaatacgaagataagagaaacaaaatatgaagttttaagataaatatttgcattttattaaaaagagggtgcatttatttactcttacatgtaaactggtaaggagattcaaatacataaaattaagggttcaaatataaaattatgggtgcaaaatatgatatttttttgcattttattaaaataagatgtgtatttacttatttttacatgtgaacaggtaaggagtttcaaatacataaaattagagggtacaaaatataaaattatgggtgtaaaatataatattttaggacaaatactagttattttattgaaatgaggggtgcatctgccacctcaaatacatgtaggtccgccggtgcgtactggttgatgaatagtaatgttgaccttagattgagcaacatcaattctttagaagtaccagagttttccctaattttggtccaaaattgataaattataattatattttctaataaaatgaatgctatggtgatcgtcatctgtaataacaatttcattagcatatacaaccaaatatattgtaaccgagaagtacaacgacttcaacataaagatctgcttctttataaggcagaacagcctgttgcataacaacgctatcaagcttaaggaggctgtttgaggccataaaggcatctttgtaatcaacacactggttgtaaagattccccctctgcaacaaagcccggcagttgctctgtatgttgttccttcaattgtccttgttgaaaggctctgtatgtgtgtacaaattgttgacggttgtgtgcacatattggatccaaattttgctatgttgttaaaagagaaaagtttaaaattagatctaaatgtcctggcatttttgcttcttagtacaaacagaaataccgaattgacttcgaagcagagctaaattttttaaaaatggaatttttgttccttttttgttaagaattacttggttcaatgagaatatcattgataaaattgtaacaaaatattgaaatctctaggttgaaacaatatgatatagaccccatatgtagtatgctctagatatgactttgaaattactattgtgtcccaatcatttgtgaatgagattgggagaaaacaagcatcaggtgaggttaaaagttgataggagccatgtgaatcatgctttctgctgattatccttttcttactgtggttttgcggaagaaatgctcttttgtttatgctcctgctttggagaatgatctggagctagcaatttaataaaatcaaatagtgaaggccgtacagctgaaagctcaaataatttgacatatgttcctcaactgtgagctagtctcatgggattgtgcttgagagttattactctgtccagaatgcctagggcatttagagtttttgccgtctaagctgatatcatattacatttcttcttgtccaacctatgtaaggcgtttgttcctatttctatgttttccaacagcagtgaaataagttgcttgtaaataggtattttgttatgagtacaacaaacaacaggaaatgttctttgattaggtcttcagtcaaagctattgacggaaaattttgtccttgtcagctgcacatctttttttcttttgttctctatgctgcttttcttccaatgcctaagtttagtatgaataggcgaatgatgtggccaagaagcagtgttgtacaaatattagacatgaaaagtattttacctggttttataaagatatagtatgtttgggcatcttatatgattgatttagtttcgttttcatgttgggcgatgttatagttgtaatacccaatatcttcatttttcttttgacaggggctgttgcaatcctgcttcttttggctgttgctcttctttgtgcatatgaactttgtgcagtatatgttacaactgggtcacgagcatctgaccgctattgtccttctggtttcttttttggagtctctgcaattgctttagcaatcaacatgctatttatttgcagaatggtgtttaatggtatgcttttgaatcacttagttcatttacaaattgctattcctgattattattaaaaggttaagatatttttttggttgttgtacaagataatcattttcaacgtagtccttatgtgacgaaacttttcaattagctcctaatccttttcaatgttgtctgtactgtttattgtcataatattgtgatattgaagttgagttaccctaaaatatatggatcaaatttaataatgactgtgatgtagtgacaaaaatatagtattttagtccctacatacacaacactcatctttagtttggtacacttcattgtgttataactccagtagatagtagtattataatagtagtagatgacattcctttttgatgtacatggtgtcccttcgtacgtatactgcttttggcttgattctatttgtttttttgtttttcgttatttgcatatcttattaccattattcattgtagggaatggcttggatgtggatgaatacgtgcgaagggcatacaaatttgcttattctgattgtattgaagtaggtccagtggcatgtttacctgaacctccagaccctaatgaattgtatcctcggcaatctagaaggtatgttctaatgcttgttctcattgttgactatcctattggagacaaataattttaaggtatttttatagcattcattactagcttagacagacatttattttgctattgcttctcaaatatttatttggattagacatatagtactatttcattaagctttcttcctccaagttcttattgtttttgtttgtctttgtagggcttcccatcttgtactgctctatcttggctcactatgtgttctgttagtatactccatcttgtatggtctaacagcaaaggaggagaattggcttggagcaattacatcagttgctgttattattcttggtaatttaattagctcttggtatttattatattatttttttaatgttaacagaaaattcttgtgcacttttcgtctctggttatttgatttgctctttttctgtgcacttcttgttttgtagactggaatttgggcgcttgcctgtatggttttcaacttcttgatagtcgtgttgcagcactgtttattgctggaacatctcgtgtgtttcttatctgttttggagtgcaatactggttagtttcttaaatgaaaaaagacctttttctcagcgccactgcatgtattattggtttgttctttgttgacttttctctactttcaccactcacaggtatttaggccactgtatcagctatgctgttatggcatctgtactgctaggagcggctgtttctcgccatttatcagccacaaacccattggctgctaggagggatgccttacaaagcactgtagttcgtctgagagaaggattccgtagaaaggagcacaacagttcatctagcttttctgaaggctgtggctcaagtatgaaacgaagtagtagtgttgaagccggtaatcttggtaatgtattgaagctggcagggctatgctgcaggtgatgggagcaattggaataatgtcctgtctcaaactactagtttgccagatggaatcattagtgataaaagcatagatagtggaaggtcaagtttagcattacatagcagctcctgtcgctcagctgttcatgagccagaagttggaacatcatctgatgatagaaatttggatcacaataattctttggtggtttgttctagtagtggtcttgatagtcaagggaatgagtctagtgcatcaaactctgcaaatcaacaaacactggatttgaatttggctcttgcattccaggaaaggttgaatgaccctaggattgcaactattctgaaaagaaggacaagacaaggtgatcgagaattgagcagtttattacaggataaaggattggatccaaattttgcaatgatgttaaaagaaaaagtttagaattagatccaactatactggcattgttgcaaaggagtagcatggatgcagatagagatcataatgaaaatactgataacaccagtgttgacaatgccatgcctaatcaaatttcattatctgaagaattgaggctacaggggcttgaaaagtggcttcagttgtgcagacttgtattgcatcacattacgggtactccagaacgagcatgggttctgtttagttttattttcatacttgaaaccatcattgttgccatatttcgtccaaaaacgatcaaaattattaatgcaacacaccagcaggtgagtgctgagtccctccctatatatttctgtttgttttgggggactgaaagatacacacacacacacctatctctagaagcttgttatccgtatttcatttgtttgatcttggggttgtaactgtttaaaccttacaatgctcattttgatatttttgaacctttattgcttgtagtttgagtttggtttggcagtgctcctgttatctcctgtgatatgttcaattatggctttccttcgatcacttacgacagaagaaatgtccatgacatcaaaaccaaggaaggtactagattggctgttttttgattaaaatgcaaagttcatctactgaaatggatgaatttaatttttaactgtttatcttgttgagctgactaatgtttggctacttgactacttgttgtaaatttgtaatataggaagtgcttctgttgccgtataatgtttttggttttgatgcggcagttttagtcttttaaggtttatacattcttatagtgcacatatattagttttagatgagagggctaactttactggtgctatcatgataccattctcttgcccatataagctcttggggtgggattattgggaaactctttggaaaagtgggattgtcctagtttgttgaactgggtttgcctgtctgtgatgggctgagctgggcagcctgtgatccaaacatgcaatttgaaaacctgaaatccctaaatccccattgtctcagcctctttgaatcacttgacctccctcttctctcagaattaaccccctctctcttggatgtggccccgaaccactataactctactctcaaatcactttggtatggcgagtgttgaagctttatttatttatttgtttgtttgtttgtttttgtttcttaaacccataatttgagcttatgctgggtctataaaaggtctcatgattctttgacttctcattacttttctgtgttccttctttcctttccataattgctgtaaaatatcaaatagacattgaattattaaataatataactattaaacaaatatataaattcttccttgaaatttgctggtgggattgtacatcttatgtcacacaatttatgagcatcccaatttattttagctaataatagaagatatgtattaatataacatgatataattaacagatgattatgtttttaaaacatgtgattagatatccaatcttatacaacacatttattaagagatatcagtttttaataaatttcaatacttcagggaaataatatctatttcgcagtgaaagaccatgttttcccctcattcctaagtaggatctcgattttgacaaccttgcatcttgatttccacttggacttaagttacaatgttgttttcttagcctgtcagaggtgtgcagtcatgtagctcatgaaaattaatggttccttgaagttcattcccccaatttatccgaacaacttgctatcgtctgttaaatcgggattgtatatcttaatggaaattgtagaatcaaacaatcctactagtaaaattgtgattttgaccaggggtggagctagcatttttatgtaaggggggccaatataaaaaaaaatcatgacttataaaagaatatttaaaatttttcatgcatgatatttatagaacttttaagatataactaaatgtattttaggagcaaaataaataaataaataattgtgttaagcatgagagagatactaattaccaagtgcgattaacatacaagggccaaagaccagtatcaaaagaagaagaaactaaaaaaatcaattaaattaagtgaaaataatttttcatagtcaaagcatattattaaaaaaaaataaattcaaaagtaaataattgtgtcacatgaaaaatacgtagaaaatacttggataaatgaatcacacttgataaatacttacataagttaactaagtataaatgtatcattaacaaaaatagaaactataaattagaaatgaagagaatttgactttttaggtaaagtgttttaataaaaaaatattgaagagaacttagaaaagtaaaataattttatatgatgagagttttttttagcagcaaagaaagattatattatagttataattatattataaataaatggattggaatttgtcacaagatgtgggcaaatcaccaaccacagaaaattacaccaagaaattacacaaacacgactcataaatataacatagcagcactgagaatccaacgactaacaatacataaaactcagtaaaaacacccaggctcattgaacccattacaaaacaaaaccgtaacatactaataccggctaaaccaaactaaaagaaagtatgacaaattccctgtatattgtgtccaataagaaatagccgattaaactgctgctattaacctcccctataacgtgttacgacatcccctaatattttttccatatacaacatctcctaatattatgagagtttgaaaatcttgggtgggccatggcccctgtaggcccctgtgcctccgcctctgattttgtcatccttccttggaggggtagctacagcctatgggtactgattgccttgggaggtttttaactcactgattgtaatgttaactagaattagggatttcatttagccatgtgttttctttttaatttattcaatttattatgtttggcctggctatgtatgtctgttgttgcttattcttttaagagactcttgttttagtgcatgcatacaataacatgaataactaataacatattctctctttctctctctctaattcaccgtcttcagtatggttttattgcttggctactcagcacttgtgttggattgttgctctcctttttaaggtaagccctactattcctgaaagttgttcatacttttaaattttgacctcatttcaattgaatgtgaataccttttttgtatcagcataactgcctatgcctttgtttgcattttattaattattcatcatataatttatgcagcaaatcatctgttctcctcggtatatccttgactgtgccactaatggtggcatgcctttctgttgccattcccatatggatttgtaatggttaccgattttgggttccccgcatgaattgtactggaagtgctggaaatgatcgaattcctcgaacaaaggaggttagttcttatgcctttcctacttactatcagggtgtctataatttgatgttttctgatgtctcttagctttatctcctgatatgtgatttctcgtagtcttagctttatctcccgatagatcactttgtttttcattctaggatatgacatattaattattttaattcatgaattcattgcatagggtgtgttatgcatttgttactttttgctctgtcaagttaaatttcttgtcaatgcataagcttgtcttgttcccttttacagggtattattcttcttatcagtatgtcagtatttgttgggtctgtactggctttgggagcaatagtttctgcgaagcctttagacgatttaagatacaagggatggaatggtgatccaaaaatcttgggttccccttacacatcatctgtttttcttggctgggcaatggcatctgcaattggtttagttgttacgagcgtgcttccaataatttcatggtttgcgacatatcggttttccctttcctctgctatatttattggactttttgcaggtattttctcattttgtatttacaaatacctacccccccccccaaaaaaaattgtttttgttgttgctgatatctaattatctatgtttctgaaactattgctgcagttattcttgtggcattttgtggggtgtcttatttagaagttatcaaaaccagggatgaccaagttccaacaaacggtgatttcttagctgctttacttcctttagtctgcattccagcagtgctgtcgctttgctgtggattgctcaagtggtaggtgacactttcttgtatttgtcgatttatctatggtaaattgacaaatgacagctattattttgctttttgatatatgtctgatcttttttaaaatgtctatttgcaggaaggatgatgattggaaactttctcgtggtgtatatatttttgttataattggtcttttgcttctgcttggtgctatttcagctttgatagttgttgtcaagccttggactgtaagtgtgttgaattcattgtctctttaactcccccttccccaaggtcaaaattctttggctgaacctcttccttcatattactgcagataggagtagcatttcttttggttcttctccttatggtattagcaattggtgccattcaccactgggcatcaaacaatttttatttgagccggacacagatggtctttgtttgcttccttgcttttctgttggctttggcagcatttcttgttggatggtttgaaggttctagtcaagtccattatattggcattgatatgcatatcttaagtagaaagtggctgatctgtaagtgctaacatgatcttttttgctctttttttctccaggtaaaccatttgttggagcatcagttggttatttttcatttctttttcttcttgctggacgggcattgacagtgagttactgattctaattttcaatcttataatatcagcatgttatcgtatcccaaatgcttttatgcttcaatcagttcatctttgttttgctcagagttttattcctttgtgatttttttcttctattccataggttctgctttcaaatcccattgttgtatattctcctcgagttttgccagtgtatgtatatgatgctcatgcagattgtggaaagaatgtcaggtttacccccactctaaattttgtttttaaatacgttggttaattttttgtttgattttacttgttatgtgatttattactttatgtatccactgcttgtattgttatttacagtgtggcctttctcatgctatatgggattgccctggcaaccgaaggctggggggttgttgcaagtttaaagatatatccaccctttgctggtgcagctgtatcagcaattaccctagttgtttcatttgggtttgctgtatctcgtccttgcctaactcttaaggtctgtgaagtcattgtgatcaacactgacttttaagctacttcaaaatttaaatgattggatttattatatacactgaaatgtctgatgaaactggcttattataatgtgctaacttctttcttcagaaaataccttctaattgaagttctaacctttgtaaaattgtacagatgatggaagatgctgtgcatttcctcggtaaggaaactgttattcaagcaattgctagatcagcaacaaaggtaagtagatttgccaacgagattgcaggaccctattgggccaatatctatattttattcttgtcctcctagcattgtttggactctggagtagtaggtagtaggcattctagccttctctacaactgctatgtatgtctgtctatgttggcaaaatttttcttcctttacagaaacaatgttcttgctaaaatttggtttactgctctgcagttaatacttctgcaaatgtagtgagaaatttttccactgattataaagtactctgtaaatgtggctgtatttattttataaagtactttattctcaatcatcctgagttttggaaatcttttatgcttttgaattaatttgtttttatcttttgcattatcattgagctcagtaattcatgctttttcttttttaacagatagtccatgttttatcggaatctttgccaaagtattctagtttagttttgaaaagtgcttcatagtgaattgattctatttgaggaaattgatatgttattctcatacattgaccatgtttcaagcatgttatttcctattaaattgttgctttttgaaataatttctcattggaatccaatctttattgtgaacaattgcctgaatgccttagtgtcagagacaatgtgccaaacgtttgacaaaaagttacaacagattaacggctaattttgtcacaccagacttgataacaagtagcaactctaggttctgaatttcaactgtttctataaatatgagaagtctattcagagtttgttcagtgaattgaattacataatatacagaaaaactttccaagcttctcttttttatgtcattttctaactcaaactgcatctctatctctgaaaatgtttacatttgaatcagaaaacttgttaatgaaataaaatttcatcaaccaatcagtctatgtttgtgtttcttgtgcatgcattgctttgaaaatagtttatgataatctctttcagtaccctgaattaatataactaaccttaaaccaatggaaatgtgttaattgcttgaataattctctttaatcttgatacttacataaatattttctaacgaatatgttctcctttatctgtttgttgattattgaatgttattgtcggaaaagaactcctgcatttgtcaatgcaattcaactgtgaattaatgatatatacttgcactgcagaccagaaatgcattatctggaacctactcagcaccacagaggtcggctagttctgctgcacttttgattggagaccctaccattatgcgtgatagggcaggaaattttgtgcttcccagagctgatgtgatgaaattgagagaccgcttgagaaatgaagaattagttgcaggttcattctttagtagattaagatatcataggacattccgccatgagccaaccagcgatgtagatcatagaagagtcatgtgtgctcatgctcgaattctggcactagaagaggccattgatactgagtgggtgtatatgtgggacaagtttggtggttatttgcttttgttgcttggtttgacatctaaggcagaacaagcacaggtaatggatatctagttttgcatatagtggatgatatcttgtttttatttttattcttgtgacaatgataatccatttctctggtaggatgaggttcgtctgagactctttcttgatagcattggattttctgatttaagtgctaagaaaataaagaagtggatgccagaagatcgcaggcaatttgaaatcattcaggagaggtactatcctgagtatctgatattaatatgtatagtatctttaccatgttttttctatctaaatattttgttgtgaattttctagttacataagagaaaaggagatggaagaggaagtcttcatgcagaggcgtgaagaggagggcagagggaaagaaaggaggaaggcgctacttgaaaaagaggaacggaaatggaaggagatagaagcttctctgctctcctccattcctaatgctagcagcagagaggctgctgccatggcagcggcagtacgtgcagttggaggcgattctgttctagatgattcctttgctcgagagagggtttcaagcattgcacgtaggattcgtgcttcacagttgtctcggcgtgcacttcaggttcattaactgtctttgatatttattctgaattctgatagcaattgataggatctttttcagttttttttttttttttttaacagtctgtttaatttgttggagggatttcaatgggaatagaaaaataattggatggaatgatttgtggaaacaattggcaggatcttttttcagtttttctaacagtctgtttaatttattggagggatttcaatgggaatagaaaaataattggatggaatgatcatcctctttatgtataatctgtgatgtagttaatagtggaatggtttccgttcccattttggttttcaagaattagcaggattgtggaggaaaagtattacaaaagtaaatgtttttttttaaattatgttatttgccatatttttttgtgaaataatgtaaaaaaatagtgctctgtagccttaaaaagtagtaaaatattttttgaaatattttaatttatgatttttatttaaaaaattaaatgttaaatctgatgttattttatttaaaatatcttttaaacaaaacaaatccatctgataaatataaaagcttataaatatagctttttaagtcaaatatatattgtttgaagtgtgtgtataaaaaacaagattacaagagtcttaattttataatatattattcatttgttcttcagatctatgtttctcagtagattaattttgttaattaaaccaaatttatttgataggtaccagcaagcaagaaagactaaaaggaagaaattaagtatgaaaatatttgtattgcagtaactggtctgaatcgagggaattcagatcctggaatattctgtattgtgtacaatggtacaaaaatgaaaagacacctagacagttctcaagagtgtctaatctctcccagcccaagcctacatctacacacctttccctggcttgtattttctctctctctccccctctcccccttacatgcacttccctcatgctctggtgccaggttggcagttagctctctcgctttctcttccccctctcctataacaaatttgatacattgcaccttttgcctctcttttcatacaccttcagtgatcttgggccttggcgctatattactattcctttccaaagtattcagtaaacttctgattcattgcatacttgttccattcccgccagctcatttcagctaactggattttctttatgataatcatctatttaaaatttctgcatgcgctcacctttattttgactgatggattactcactgaaaaaaggatgatggaaaattatttttaagaatttaactagaataatgcattgacactgtatatgttttttactgtctgattgttgtcagatcctaaattgtcatgtgtagtaaatttgttgatttttttaataattaccttaaaattcatatttaaggttatttttaattgaatgacagtatacaaatatttacactgacatgaagattatacccatttttttattggtatttatataacaatccattacgaaagtctaattttgtttatctccacttgtggtatcataatttaaataattaggatgactcttctggagattacttaatttacattgaaattttgatatctttgcagacaggagtggcaggtgccatatgtgttcttgatgatgagccaacagccagtggcagacattgtggtgcaattgattccagtctatgtcaaagtcaaaaagttagcttctccattgcattgatgattcaacctgaatctggtcctgtttgtcttttgggcactgagtttcagaagaagatttgctgggaaattcttgtggctggatctgaacaaggtattgaggctggacaagttgggcttagattgattactaaaggtgataggcaaacaacggttgcaaaggagtggagtattagtgcaacaagtattgcagacggaaggtttggtctttctctttattttatgtatcatatatttgttttttaaagttcaggttcagttacccagttctcttgttatatatgtttaccttttgttgcaggttatcttcacatgtgtgtcagtaatcttcttagtataataacattttgttattctaattttaatccaaatgcattttgggaattatatggtttcagtatttcttattaattgttttacaattctctccagatgaagtttcacaattttttcaataattaagaattcaaaagtcaaatttcaatctctgccagctttcttgagatgcaaaagatagctagttttacctttaaagactgttaggactgacttttactattttggcatggtaaacttgcaactgaacaaaatttatactgcatgagtctattttaaaatacaggagatttttatagagcaaaatacttatattatttgctcaattgcttgagtttgtcattatatatttggatggttctgtctaggccatgttatttcaatgcacaataaattgttgtagtttcttacgtttctgtgtgggtaatatattgcaggtggcatattgtaacaatgtcgattgatgctgatttaggtgaagcaacatgttatttggatggtggatttgatggctaccagaatggattaccattgtgtgtgggtagcagcatttgggagcaggggacagaagtgtgggttggtgttagaccaccaacagatattgatgcatttggtaggtcagatagtgaaggggttgaatctaagatgcatattatggatgcttttctttggggaagatgcttaactgatgatgaggtttcttctatttataactcaatggcttcggcagacttcagtgcacttgttttccctgaagataattggcagtgggctgattcaccttcgagggtatgctgcttcttccttcgctgcctctcccttcttgtagagaattgaaattttaaaaacaacatatataaattatagaaacaaaataaattgtcctcctaatactgctaaatgctccaacatgtagaaaatgttcttatcatgctttactaaacatcatcctgttgtctgctttattattaaaaaataaaaatagtataacaagtggtgttttagccatcatgtttactttgtctaatcttattaacacattttgtgtctaggttgatggttgggacagtgatcctgctgatgtagatttatatgacagagatgatgtagattgggatggacagtattctagtgggaggaaaagaaggtcagaacgtgatggcatggtggtggatattgattccttttcgaggaagtatagaaaacctagaatagaaacacaagaagagattaatcaacggatgttatctgtagaattagccatcaaagaagctctctatgctagaggagagagacgttttactgatcaggaatttcctcccaatgatcactcattgtttgtggaccctgcaaacccccctgcaaagttacaggtacttctctttattattatcttttagtttactgtatttacccccccttacaaattttatattgtttcatgtacaggttgtttctgagtggttgaggccaggtgagataggcagacagaaccatcttgactgtcgtccgtgcttattttcaggagctccaaatccttcagatgtttgtcaggtctcatgttttacacctcacttgcaagaattttgaaataaatgtttgttctcattatgttttgttagtatttagattttgcaatgtgttaatagttatgtatattgaacagggccgtttaggtgattgttggttcttgagtgctgttgctgttctggcagaggtttcacgtatatcagaggtaataatcactcctgattacaacgaggagggaatttacactgttcgcttttgtgttcaggtaataagcatatagagtcagattttagtttctttttattttctctttttcatgctgtgactggatagataacattttccaaataaatggcatctaagttcttttcatattttggttcatgatatctagggtgaatggatccctgttgttgttgatgattggattccttgtgaattaccgggtaaacctgcatttgctactagtaagaagggctatgaactttgggtctccatattggagaaggcatatgccaagttgcatggctcttatgaagcactagaaggtgggcttgttcaagatgctctggtggatcttacagggggtgctggggaggaaattgacatgaggagtggtgaagcccagattgaccttgcaagtggtagattgtggtctcaactgttgcgcttcaagcaagaaggttttctcctaggtgcaggaagtccgtcaggttcagatgtgcacatctcttctagtggcattgtgcaaggacatgcatactcaatactgcaggtaatgggataatgttttatatttttatattcacgatcattgttagatgtaaaaccagtaataatccttcacctaaataacttggtaagtttttaagagagttggtccttgacatggaaacaaagccttttatgttgagttagtcaggagtttatccttgttactttgttctatttttttaagttgaatttgagcatgaagtagagtggagttgtgtatgattcatgctttaagcccaaaaggttctcttatttgaggagtgtgtttggtatatagtcattcatggcaactcatgagccttcacccaacaactcaagccttatggagagttactctgacaatcctaatgatttttaatgatctctgctgtcatacaattttaggtaagagacgtggatggtcataaacttgttcagatccgaaatccatgggccaatgaagtggagtggaatggtccctggtctgactcatcgcctgagtggacagataggataaagcacaagctgaagcatgttccacaggtagttctttatgcttttctgttgtggattagtcatatgcttgacttcttagcatctctttatgattgagccgactatttgctcttacccaatgttattatcatttgctgacgtcaattaaccattttatttgttacttttttcaacagtcaaaagatggcatattctggatgtcctggcaagattttcagattcattttcgatcaatatatatttgccgtatttacccatcagagatgcgtcattctgttcatggtcaatggcgtggttacagtgctggggggtgtcaggattatgatacatggaatcaaaatccacagttcagactgactgcaactgggcaagatgcatcatttccaattcatgtattcattaccttaactcaggtactactgatatttccatacttagtactgcaatttctgaaaagaacctttcccttgaatttctttaaaacttcatttcatgatatttatagggtgtgggattttcaagaacaacagctggttttagaaattaccaatccagccatgattcacagatgttctacattggaatgaggatactcaaaactcgtggcagacgtgctgctttcaatatatacctacatgaatcagttggtgggacagactatgttaattctcgagaaatatcctgtgaaatggttttggaacctgagccaaagggatatactatagttcctactactatacaccccggtgaagaagcaccgtttgtactttctgttttcaccaaggcatcgataactctggaagctttgtagtgcctaggatagtttttacatgtatcttgtcctcttgataagtttctctgcctgggttctcggtggatcatgtacttgcactgccagaggccgtcttagaacaattgggtaattttctcttccccctctcccaacaattttcttttcatatatatgtcatctaacatttatggtttgtattttctcttcacagcattgagacactattcctggggaaacgacatggcatctgttcgagagatggatgaggtttagctgcacataaactcttggtctttgaatctgatgattcatcatcttgaacaatgcttctgccagcattgaagagggctctcgggtgtttattgtgtacataaaaaagtggtactataggggtatacttgtaaccatgtaagcaaagttgaaaaagaaatagctgcaaataagtaggaaattactaacacctggttcaaatggaggtaaggacagtgtggggaggtatagtaacaagcattgagtgactgattgtaaattcagttgccgttttgacaattgcaaaaaattgtacaaacattaacaattatcagttcctatcatttattggcatttgggaaaattttgtacaaatgtctttctaatctaatttgatttcaaaataaaggagcattcactagttgtagttttttcttggttgaaatacaaaatgatgaaactatgaaacggcgagaaatgttcctatcttacagtatttagtcttgcagtccttatatgtctatagagttccaatcgtttatataacttgaaaggtcaaaaagcgtttcagagttttttatactttctaaatgttaatttctatagactccaattttaaaattacaaatttctaatagtaactgtagatactagctattttttatatcagcaaggtgttgtcaatttagcataatttttttaaaatgtagggagcaaactaaataaaagatttgtaaagctaaacaaaaatttgacgaaatcatgtctgtggagggaacgataagggcaatgtcaacataacctcgttttgtctgctatgacacgtttctctaagcttttctcttcgaatataaataaaataatgtaattttttttaaaaaaggttgagaatagaaaataattgttatactaggcaattgtatgggcatgcagaggaaaagtacaaaaaggggaaagaaattcgaaaatgaagatttaattaaaagaaaaattctaataacattttttaatatatacttttaaacattttttattattaattgaaatctatatatccattaaataatgtgagttttatttgtcgtacttttaataaatttgagttaataataaagaatgtattgcaaaagatattatataaaatgattgttttcgttaaataaaatatatacatagcctaaaagtgaatgaaaaaatagatatttacatagccaaacctttacgataccaagagagagatataaggtgcaaaacagagatagtgttgaggtgaaaccgtgaaaatttgacatgtagtattaaatttacgcgtgtatacacttgtgtattgataagaacccctcttattttggaaaaacaaaaaaaaaaaaaaaaaaaaacaaaaattggaaaaaaaaaaaaaaaacgatgagatttggatgtacgatgttggcggattgcagaagacacgcgagtttccattttattttgataggcaactatttagtggctcaacaaattttgcgggaaagtgagaggttttatcaagtcaaaactaatgtgcttcacgttcataatatcgtttgattgttatttacttcttgtaatataggaatctgatgagttaatgatgaaatggtttgtgttattggtgtgcagagttgtgagtatatgtgtgctgtgttgccttatccatagtgtcactgtaagagggaaaataataaatcttgaaaaaaatatgaaaagagatataaagaaataatgtaatactacatgatttgatgaaaagaaataaaaagggtatatataatatgttagcatttcttatgtttataataagaatttaacggatacgtatttttaatataaaatgtttactgttagttaattaaaaatcatattttgtatgatttttaaaataattattataaaattaacaaactttattatacataatataacttgtgagtttgaaattgaataaggtcttatatatttttcttataataaatcaaatctaatgaattttggattatagacttgtatacgaaacaagtagggttgtgttacatgacaatgttccctccgagtgatttgagagaagaaaataacaattaacaagtgatcctgcaaataatttcaacaagttaagatattttattatcacctctattgccaattctccttgatagcttatgtgagtgtaggaacgaaagatggaagaaagagtgagtggatgtaaccatgtcttaatggttccatacccaagtcagggtcacataaacccaatgctccaattcagcaagcgcttgagcaccaaaggagtgagagttactttggtcacaaccattttcatttccaagtccatgcatcttgaatcttcttccttacgaggcagtgttcaatttgatttcatatcagatgattatgatcaaggtggttttaatcaagctggtaatgtaccaaactatctttctcgcattcaagaagtaggttccaataacttgagggaactcatcaaaaaacacaactcttcagatcaccctatggtgatatgggtattggatgtagccaaataatttgggttattcggagctgcttatttcactcaaatgttgcagtcaattacatatattataatgtttaccatggacttcttaaggtccccatttcatcaccaccaatctctattccagggcttcctttgcttgatctaaaagacaaaaccagcctttgtttatgatcctagattctatcctgcttactttgacttggttattaatcaattttctaacatccacaaagcagatatcattcttgtcaattccttctacaaggtagaggagcaggtatatttcttgtaaacttgcacagtatttcaattcctttccaagaatatgtttaatttactattcatttgatatcaattcttatgtcaatggtttcaaaaaaaaaaaaaaaaaataattatgtctatgattgcgtaccaacatgtttaaaatttatcatgagccatgtattggggtattgcagagctagtcaaaacaataatttcatccctattcatgaaaatgactaaactattggtggtatgcatgttaattgaagcggttgaatagtaacagtaatgattaggaaaggtaaccagaagggagtagtagagcaagataagatcttatatcttatgggttacaagttcgagtttccacttgcctttctgtttttttgagccattagttggctcaaacaaaagcctgcagggtcagttattttcatatcatttggcagcatggtgtgcttcagctcacagaagatggaagaaatgcattgggcctaatggcaactaccttcaacttggtcatcctgattagagaaagaatcttccaaaagcgttgggagaggaaattaatgcgcgtggaaggggtttgatagttaactggtgcccacaattggaagtgctatcaaaccatgctgttggttgctttttcacacactgtggatggaattcaacacttgaagcattgtgcttagggtgcgaatggttgcactgccacagtgaactgaccagcccacaaatgcaaaattgttgaggatgtatggaagggattcagagtcaaagaatataatggattgtaatagagaagaggttgagaattgcatcagggtagtaatggaaaaggacttaggaagagaaatgagaattaatgctaagaaatggaaggaattggctatagaagagtgagtgagggtggcacctcagacaacaaaatcaatgaatttataaataatctgaaaagatcctaaactaaatatccatattggtttcaattaatatttattatggttttccctaaaaaaagtattgaattgtatgagaatttatttccttctgtctgtttagttgatattatatgtttatttgattgtatgttaaattattatatatacaagcaatcacagactaaactattggtatatctttcattgattctgtattctaaatttgaactagatgtaaatatgagactgagttatacacgagagaaacgtagtaacacgtttttttttttttaatcaacaacgtaataacacgttcttttaaaattctgctaaaactacatggctctcacttgataacaacattatgtaattgcaccagatagcaattcagtgcaatacatatcgagtaattagtcatctgtctatgaatgaagagtataaaagagttttataaagacatctaataacaaattgttatagatggtaattccttttacaataattactttaaaatttatatttattgtaatttttatttgttgatgatatgattttttttcctacattaacacattgatttgcccaattattaaatcatatttgaatgatcaataaaaaataaaatacacatgacttttttaaatagcatgtgatcactaattaactaataatcttatagctcttctttcttgcaataaaatatatatcaaaaacttgctaatggatgtgctagtgaaataatcttttaaagaaaacaagattccgattgtcaaatcaccacgattcaaagtcatttaataaaaaaggtttatttcctaaattttcaacatatttttagtccctgaattaatatttttttttttttacttttagtccctcaaagaaattaaagtaaggataaaaaatgaaggttaagagggacattgatcagtaaaaaaaacgttcaggactagaaacaaaaatctttaaaatttaggaactaaaaagataatgaacccattaaaaaattataacacacaattcaagcgtgttaaacaaatttaattaagtagtgagaaagaaaattatatttgcaaaggaatcaacagtgcatgcataaatgatattcatcatatgtctcaagacaaaataaccacactcacggatgtgctaacttgtttaatgtaataattttttttgcagataatacaattttgattgaagaatccagtgaagcaattaaccttaaacttgaactttggacactcacggatgtgctaacttgtttaaagtaatcttggatgtacttaccaaaaatgtataaaaattatccctaatttttttttttgcagataatataattttgattgaagaatcaagtgaagcaattaaccttaaacttgaactttggagattggatttggatagagtttaagaataagtaggaacaagacaaaagacaaagtatatatatatatatatatatatatatatataatatatatatatatatatatatatataacacacttagctagaggcaaaggtttccaagtttaaatatctaacactattaatacaaaatgacaaaaaatgaatgaagatgtcatatacggaatacaagcaaaatggctacatgaaggcatcgacagttatccgtgatcacatttttttgtgtgaatattatctgtgatcacatgttacctaccaaagtcgggcaagttttactatatgtcctagtgacctactatatgatattaaatgttgaaattttgaggaaagaaagattcacagaaatgataatgttaagatgaaatatgtaatcacacaagaaagaacatgacataaaataatagtatacaagaagatattaatgtatcaccaattgagagaaaaaaaatgacaaacaattatgatgattttgacacaataaaaagaaccagtgaagaaaataaattatatggtttttaggcgtgtagaaagggagacaaaggacattaagaaaagttgttaagatacatctcagtaaatatcaaatgaaaagttttgattttctacatactaaaggattagttttcatttaataataatttttttatttcttaacgtgtatttaagctattagttaacaaattattaaatggtattgtgtttcacttatatttcaattttagtacagtaatgcaccccaatagccaataaggcctaagtgtcgtatcatgtataaattaaagtatatttgtgtgctcagctgtcaaaaatttacagagcttgctcacacttcattttcgtctgtctgactgctacaattgaactatttgttaatacgaatacaaaaatcaatgactggaaaattcgaatggcctagagtacatttgcgcaacatattttgtggcatggaactcaaataggatgtctctggaagtcaaatgatgggatcataccctctacctgctctcatcttcaggtgcattaccatctttcctccaactgcccaacttaacaatgtcctcaactagaattttcccatctatagcaacaaaatgatatccgtaaattattgttttcatgaactaatcttcataaagaatagataagtttgataaatagtcactggatatattattcagataaacattacaagtattcaacatcagtccttgatgaaactctttagaagttgataacttcgtagggtaaacattaatttggagaccaatttttttaggcgcatactttgaaaagtaaatagtaacactatatttaaaaagaagcggcaaaatactggtttagtaacatctcaaaaccagtcattttaaaagtaatttttaaataattttgataacccactgaataatactttaatggcataaccatcccgccaatattcatagatgaatacttttggttgatctgtctgtgatactgttcagttacctattgctctacacgtgaatttccatgaaaatttcactggaatttattttatgtgaataaagaacaaaactatttctgaatgcactacattgcaaacaaaatcaagaattaataagattaaaaaaaaattagcatcatgtgcgagagaaatgacagacctctatctttggaaagactgctgacaagttcttggataccctccttgcccaatgtatcctttaagtacattgcagcagaggctacctcctcaggagttactttcccatcataatctctgcaaaaaggcccaaaaatatctctgaaatcttatgcacagaagtcattacatatatagattgtcctaatgaagtaaggcatgtataagtggcaaacaagaagaaattgtgcacaagactaatcaaatttatcgtgaaataataatcacattgacatcccaaacaatattcaacttttagaacaaatgtggaaatgtattcttcccatttagagttgattgataagcttgcaacttggaaaatgagttcagacttatacctctgtcattcaaatgccagcaacttataatcaatattattattaacagaatgaaatatattcacatctttctcttgtggtagtggaacttaaattgtaaacaacacaaatcctttgtagattatgaagcacaacaaagtagtgcccttggtgaaatttataattgttaaaagccttaagggaaattgaaaacagcctcacttggcggttatatatgaacaaagaagcaggagaaagttaagcatggtatctttggtggtaagtcattgacttctatctatgcttattttactgactatatatgcaataacatttattcttactataatatcaggttcagaccccagaaaggtcccttctcatacaattacaatatcttgattaattgaacagtaatcacagtctgtggcttaatctacccgtcactctccttgggtaagaattcaattacaaaagagaacattttatgacatcaaatcatttatagaaaatacgaagtaagaatcccaaccaataaccaaatgtgagcaatagcaactacagaaatgccaacacacgccgacaccttttgagttttgaacatatttttttattattggttgaaatttattccaacaacaaaatttgtgggtctcacttttatttaatgagcactactcatgattttatagttttcaataaattttaaccaataatagagtgtgttgaaaggagcgtaagtcaaatgattcctattcagcaaacttgaagcagtatgatatattcaagcatgcagtggcaatcacagattcacagtttaactttcactaaactaaatttatgcaaatgcattatgaaaccacatacttcactttaatgagatctgataaggttagacaaagcatgaccaatgaaaattgaaatgtcaaagagccttagctcaaaagcaccatgtccctttagggactgcttgatcatacaatccatctcagcccggccactttgcctaaactttatcgtacctccccccgcccaaataacaatgttgaagagctagtgcaaacctgtccagcagcctccaacggtcaccaattttcgcatcaacgtcatctatttccttctcaagattttgaagcatagcatcaacctgacagattttcaaataattacaaattcagaagtgcaaaattagtttctaggttttccctaaactagataaaatgaaatgggtcttactctcccaatgagtgctgatgacaccttatccccttcacctgactcagtagcgtgttcatgttcctctcgggcagctttatatgccttaaaggcatcttttttaccatttgaaccctcttcctctaccatgctgttatagagttctatctggacacatacaaaacagcaatgataagaatggcaaatggattaaatatatgtgcacaatcacacagagggtggggatcaatttaagtgtaacaattgtcatacaaagacaaatgcaacttatagggcaaggggcatgtaccccacacttagaattcatcctcactatcactacttgttaaaaatgctacatgttaacaatgtcacagatgaattgtttgtttgattacattaatagagagaaacatttgaaagtggtagcaataataatattattattaataataatatcaagcatatgaaattgtgtattaaacaattgtagacttatctttaattaggttatattattgtatttttctctataaataaatatttaaaaaaatatttcatgtgttcattataatctttgaccatgccccagctaccaaaactgcctaggtttgccagaacaacaaaataggatttgatacattacagttagttacaacacacaacaacttcctacaagaaaacaatgactacttgaaatatcaccaatggttccgtatatctttcaagccaatcatttgaaaattgaaacaaaaataaatctgtaataaaaaggttaatgtttcacttatttgcaaagcatattaaagataaattctaatatttttcaatgaagtctaaaatgctcttaggcaaatataaaattttatgagaatatgagcatgatacagactttcaatccaaaataagacttttctgaaaattcatcttatagaaagtaattcattatagacacacactactctttctttctgtctttgttgatggatgttagcactccatctttttttttggaccaaaacaaattcctccgttttctttttcaaacaacttaatcttattggtatttggtcttctaataatttatatatatatatatatataaaaacaatctttctctttctttccccctctcttttgtatctctgaacctctttcccttaccttttccctctcccacacctctctctgaaaacctgacccccctccctttcagctttttaacctgtctatcctctgatgatgaaattggatgaatctggtgcagaggagaacaagggaaaaaataataacgtatattgtagacatggtgattctcacagcagaagagagacattaacccgagaaaaaaaaggataactaatgaattttaaatttaaaaacaccaccttaataaaatgtgttaaagacctctacgtgtttgtattgattaaaactcaaagacatattgttagcacacttgcatgcacaacaaatatttaatgcaatctatagaagatgtaaaagcaaatgatgaattttgaaagttcacacatacctctttgttaaccagtctaagaaaatcttcacgctctgaacttacagactgccaccagagtaaaagacaaaaccacacattaaacagcttaatgttaaatagtatagattatgcaaaataaaagaagcaattcaccaaattaaaggaattgaatgttttagatatcaaattctcaccgatgcagaagctaaaacagctaatgcacgactaagttcacacagttgttctttgttttcaaatgctctgtctctagcaagttggtgagcctcttttgtgttgaaatattcatctctttcagggccttatcatcttgactagaactactctccatccttgcttgcaccacctcctctctctcttcctcctcctgcatttatttataatactatgttatgcattgtgttttttgataacatggaatcttagatcaatagaaagctacttaattttcatcaatagttatttaaaatcagaaaatgaactttatggtgaactctagcatatcaacacccaatacttcatttgttaaacttactgatcagactcccaatgaattctgtcaaacaaaatattgaaatgattctttttatgtcactgatcatttagtattttttagtagattcttctcatatgaaccagagcaaatatcaaacactatcaaacagaaaaccttgtcaatgtcatcctaatacaacaaagataccttttaacgggataactatctagagcaatgcaattccatagtttaccttaataagttcttcttgcatttcaaggaactccaatttcctcctcctctctgagacagaatcctcagagggcaaagatgtaacctgtatagtatctacaacctcatcagggagagaagaaagtgtagcctgtacagcttcttctggtttcaatctcccagacacagtaaatgacctataaaggatatcaagtgagatttcaaaatgcatatccagcgcattttttctttaacttactatttggccccatcaagggactgagggaggaagccatgctaaaattaccttgaaagtatcaaaagagatgatggaacagagtgattcagagataagtccaaccaatctcgaagctgcacaggcaggttcacaaattttagaatagaaacaccaaagcaacatttgatattcaagaaaactgaggttttaatatcctcatcaagatccagtactcaaatagaatacaaatcatgaattgtttccaacacaaaacctgttggcgcatttcttcaacagaaagcaacccaagcatgcctcgctctctacaatcttcccgaagttcatcttctgaaagagaatccacaccttctgcttgaatcaatttatcatcttccttaatcctaaaaaagggggacatgttgcaagtaacacaattacgaggttcatcaagttatatggtaaattgaagtaaataatctgaaaaggtgaaaaagaaaactattttgtgaagtttttgtcaccaatgaggctaattatagtcataacagaaaatgaatgcagtagcatataatagcagtttgaagcaatatattaatgagagattaataaggaacaaggcctacatttcaaacctaaatttgtaccaaatcttttaggcctacatttttgtctccaattttttctttttttaaataaaattcctctctaaatgatccaaccttaaataaatggaaagaaagtattcttgtaataatttaatcatgcatgatgataccaattttcaaaagttaacatagcattaaactccaacccaaacttaggaccaattccaatccaatttgggcaccaaagttgcatcaatggatttatcgggaatttgatatttgattgagcccaatgacattatttgtttcatgaagtcaaacctatctatcaagatgaggctttggttgttgttgtagccacaagatataggagtactctggttgtgttcaatcttttgatatttatatttgaataatacaattcacagagattatttgttctcttattttgtaccctaatgacatagtatggggaggtaatattttctaataacaaggtatctttttttaattagagattttttttttcattttcctaattgtattacaaacagtttagataaaaccccaacttgcaattaaaattagtaaagaaaaaagttacaaaaacatgcattataaaatgcatcctacctccgtaaatgttttcttagcatataacgcaagtatgcatcagtgccaaaagggctgattcccatgtacttgcacatattgactaatcgtggcctacgagcagtaaagacaaaatataagtcataataccacctcacaactgagaaaaacgcatattgaagtcaaacaggattaagaaacaaacctgcttatattatctagagtaagttcatcattaaacaacttagcaaagcccaaaatttcctcattagagacagttgcacctcttctaatctgcagaaagtaaataaagcataaaaatgacaaactaaggaaaacattcagaaagaaagattgataaacaattctttgaactgaagttttaaccgtgtttaaaaattcatcaagatcttcagctgttttctttagttctccactgcgggagttctgaacttcttttgccatttctttgactgtatcctgaaggaaccttgcatactctattcttgccttgagtctccttttcaatgcttcctacacattgagcaactgagtcacccaaagaccctacaatgggcaatcaaatcacaaattcatggtaactgaaaagataaaaaataatgcacactacaaatacagagacacaaaaatggtttctaatgaggatatttgttaccagtggctgctagagaacatagaacatatattggtgcaagctcatatacaattttcaaccaaagatgctgattattagggtattttggaagtttggttttagaagagaagggaaggaagaacaaatttttatttcaaaaaaatttctctaattcaataaaaaaattaaaataaaagaaataaaatgatagatcagcatcaattaatatgttaatcttttataaacattatacagctctcttaatttaaaaataaaatatttgtcctcccctcccttcccctccaaaacctaattcccaaacatatcctggtaaaaaatggacattatgttgatgttaatccttgggagctatactttacataggaccttcaacaaaggctaggacaagccttgcagttgcttagttatagaatttctatttcccctggtattattagaatgaagaatccggctttttaaagtgagtgatttcagttgttgataagaaaattaacggttacgtgcacatgcataataaatcaaggatgtgttgaaatatacaccattgattttctcatcaacaattaaaaatacttaatttatccttactcacttttgagaagccaaatcctagatggaatgggacaaagaattcaaacagtttatgtacagtttattttaaactagcaaagataacagcaaacagccaaaaaaattcttggcaattacctgttctttcatcttgtcttgaaatgttgacggcaacatgttagggaataactttagaaacacaggcaggaggaactccataaagggaacaataatgaaaacagcaaaaggaactagcctaaagatatcggcagtagtccgcgtcagttgctgcctttcccttctggagagactcttcccacccgcaagcttcaacaacaacctggaactgatcctcacatcagcccacagcagcttagaacccaaccaataatgctgcaacgtcgacacaaattcccctttccagtgaaccagtttttttgcccagtcctccctgcagcagcagcagcagcaacaattagcaaaccaaaacaccaaataaccaaccattaacgaataaacatttcactgcttcaaatttctatctaataaattcaaaagcccgagctgcgatttctatactctaaacacaactataacctcaatttaaaatcaaatgcactctcaaccgtaaatgcaacaattagcaaacctaaacgccaaatcaccaacgaacaaacatttcactgtttcaaatttcaatctgaaacagcaaatagcaattgcagccacaacactacaatttcaaaagcctcaccgtaattgctataatccaaacacaaccgtaacttcaatctaaaatctaaaatcacatacaaatatcaacagtaaatgcaatttcgcgtaatttatgaaaccgtaactgcggacctactcatagacgcgacagctctcaacgcaggaccgattcccaaaaacgcagtccacactctccgcaacacgctttgtaggtctttctgcgcctcttcttgcgcccgtttcgccatggctttggccttcgcagtggtcaagccttcgacggcttgatcgcactcctccggtgacgcttctttccgcttctgcgccaccgtctcatcgttctcatccggttcatgacgtttcgccgccgaggccgacgactgcgacaaccaccgcacacctatcggcgcgttcagtgtcgaaaaagcgtcacacggaaccgcgctcccgaatcctcgaacaacttgcaccaatccgaaacgattgaacaagtcgtctctgtacggcgtcgttccgtgcttacaaggaaacagaggtgacgtcgtagctatagcgcgttccagagagcgattactcggagacggagaagaagcaaaacagttattcaagtattgatggattaaacttctccttctcaaaattgctcgtgatgccattctcgaaggaactaaccttggaaaagtcacagtaagagatgagaaaaaaagaatgaagaatttgtggtactacacgtacgaattgcttagatcttatttttggttctattgttagtgagaattcggttagaggttgaagatgagatggtgattgaacttacttatgcggagcgtagaaaacggaggaggagaatacgaagaaggaatgaagaaacaaagtgtggtgagagttagggtgttaggaaagtagagcggagaggtttaaggagtttttgttgtgcagcgtggggaggggtcatcgggttttcttacactttgtccttcctacttacgtcttattcattttataccctttcaattcgtgctgcttgactcgttatttaggttggtgggtaaggcaaattattttgttggtttaaagtattttataaggcaattgcttcttgcatcccatgtttgcttcttgcatccataagaaacttaaaacatgcaaaaacatactaaaatatgcttctcctttgtctaaccctaacacacctctcccttttcccctaattgcacatcacttcctttccttgacatcaatgttgtttaaggtagatccgttgcagtggttgatggaaagggtttatcttggacggcggtggcaatgacctcttgcacgaagaggcatgtgagacaggtatcgtgggagtagtggaggtcaacgtactcgttagtgatggagagtggagtaggagatgttggcactggtctagtcgatgtagagggtgacggcgtatcaccagttggagacaaatcgggagggtgcgacatggtggttggaggctagataaagtgttgtagttagggccaacaattgcagctaagcaactaacgaaaactccacttgaactccactttgaatagtcataaatttgccaatcgaaatagggtcttcaaagaatacacaagtattgtggactctatcttgaatgtgtacacggttgaatgacaccaaacaccatagtgttcccttttgtgtttttgtttggagaacataatttggaatagtttttggtgtccaaattatgtaatttgaaagaatatgggtaacctgaaaaacttatacttttatggaatacctattttggaatatgattttcattttagaaggaccattatgtaataagtgaagggtgatttgaggatttaaaaacctttaggggtggaggaagcaaaaaatcggtgcaggaagcaatggcgtctttagaattgatatattgttttaatctggcccaaatatatgaaactcttaaatccatttgattcattttactatccccaccttaatgttttgcatgtttgaggttgagaagttgctattggcttcaaccccatttgttattggcctctacaaacgtgagaaaataccttcttatccctctatcttcctcttcacttcttctcaccccacccaacccatcacaaccacaccaacgctgcgcgccaccaccttcgcctagatccaaaatcgcagcacatcaccacagtcttttcgaccacctcaccacgtgaccacctcaccaactagatctgaacgcaccactaccatcgtcgcacatcgctcccaactttagatttgcatgcacgacctctcaccagcccagccaccgtcgcgcgtcctcaccattgtgtccaaacaccattgcatcgccgcaactccttcccttggtttgtgcgcccccaccaactccagatcacatgaaaacatgcttctgttaaggaggaaaaaatatatatacacaacaaaaatgtgatttcgttttacactatacaatagaatcatatttccgttgtatatatttttcacccctacttaatccaatgaaattgtgttttttggcacccccattacataatgaaaagtcgaaaacccaatttcgttgtacaaatagaatcatgtttccacgaaaagggcatttttggaagaaaaaaggtgtcagtcccttagtaggggccattagcaatggcagcagggccaatagcaaccaccctaaggttgaagtgtctcatgtaaattgaaattgtaacatgaatagttttgagaatgtggacttcttgttcattaaaaaaaaaaaaaaaaaaaaaaaaaacagaatgtggacttcttagtgaacttgccccatgtaatatgggaagagaaattcaaagaagacacaagtgattctaatcctgtaaaattatctagatgcaatcctgcaggagttgaggaaggcaatcaaggcatagtgtaatgcttttcctttgggtaaagcctccacagtaaagatgattaatcatgattgcatggtacattgtaagggttcctgtcctgtcaatacgaactacaaagtatatccctgcaacattaaaaaatgtaaatacatagaaaaagtatttgctagaaagattcatatttcgaacagaacaagcctcttaatcttatattccttgcagtattttctggacctgatgttttcattcatggataatgatgttgtattgctgttgcatcctttctttcttttaacttgtgtgcatttttgtgttcttttgggtatttaggggtgggttcaattattgatatactgaagtcccgtgtatacatagcacaattgattaaaactcagaaatcaaaaaataatttagaccaagcatcatgacaacgaagagagaagaattaattattaatttatctgttactgcaagttcatatttatttattgtgtttctaatatatataactcctatatttaagccttggtaattgaagattttcacattctgattttccccaccttaatctgcaaaaattaaaatgcatgctagtctaactcttcaatcattaattgtctgttccaattctcttttccccatgctatgattttgatggtagggacaggggaaaggtgtagctaatgatgggtcagaatggaaacttgaattcaaattttaagataacatggttgagttggttcaaatgtgtgcagctacacatgaatttagtgtccaagtcttcaatcagttgatcttaatgtgaatttatacttatattgatgataccatctcacgtatagatgtctttgccatagcaagtgccccttttgcaaggcatgtactgggggaagcatctgaggattgagggcagatgcaacctgagatggcaaaacgaacgctttagctcaaattgagagatgtaaggtaatttacacaaacatcatggtaacaattgttagcatgacagaaattacaaaattgagagatacaactaatcatttctaagcaaaattcttcattcaatttgacaatcttaaagataaaagatataggaaattacaaaattctggcattggtaaataatgagtttagacacagatttgtatcctcgtgacttaagtacagcaatattagtatattactgtgatcgggtttcttaatgcaaagacaagatacaaattactcaacatatcaccataacaagatagcctggttatggatgtatataaggtccagcgaaaattatctttttcaaagaagagaaataaacttactattttttaacttacagattaataatgttcactgaacctttatcatccaaacagaattgagaaccacctccttactgtcaatcatccatcctgaatcaaaccataaaatttccaacttactgaaaacgtcagccaatctttagcttactgtcatcaacttatcatcaaagtgacaactattaatcagattatcaatactcttccttcaattttttaataagaaagatatattttcatttttcttcaaaaagaaaaacttggccataattaagtgaaagactgatcaccatgcatgcaacacgttgttaatgagagaaaggaacactgaaactttatttaaaagataaagttacacttcaccgttgaaactttattgtttcacgctgttgaaatataaatgtgggttgaaatccacattggttagaaatgaaaaaaattaaataatatataaatgaagaaaaaatttatgtactttaactttaaagttttaggttaaagtaggatgtgagtgaaatttatttatttgagactctaatgtaaatctccccatgtttcgaaagtcttgtgagcccaagtttttgtgtgaatctatcaatcttatcatcaaagtaacaactagtaagcaaattaccaatggccctccttcaattattttaacgagatatatcttttcctattcttaaaaaaaattctcaattattaaaaaactacattcaattttatatcattttccaaagtaacaaaatgtaaaaatgataacattttacattgataatcaatataatcatgtaaaaatatatatttacaagtttattttaataaatgcataattattaaactctaatttttattcaatgtttacaaactttaattcaaaccaaacatacatttagtgagctgcattttttaatattattgctttttgttttttttcttgctatctgtctttttttcaaccttacatacactccagttgatattttttcctaatataaggtgccgaatgtacttgaagccaatgcgcataacacattattccaaactgataaactatcatcccatatatatatatagaagaagcatcgatcttgcagtctaaagtatttgaagatggtgtgttataagcaggcagaatctcataccttgcttgttttcacatactcgtggttgtggtgggctacttgtcttgctgctgcaaataacagtttaaagccggagatacactgaatacaacaagccggctatgttcagaaaagaataaatactgcatgggtttttccccattaataaatccaaattctccagtctacacttctcacttgagaatcactgacaccgtaaacggtgatgatggcaacacagtgtgggttgcaaatagaaatcaaggtgttgaaaaggattctgcagttcttatgctgaaccactccggtgtactcaaaatagaatccaaagatgcaaaacccatcatcctttactcttcacctcagccactgaacaacaccgaagccacgctgttggacacaggcaacttcgtgctgcaacaacttcacccaaatggaacaaacactgtgttgtggcaaagttttgattaccctactgatgttttactccctgggatgaagttaggggtcaatcacaaaactggtcataactggtcacttgtttcgtggttggctgaaaacgacttaagactcgggcattcagtctcgagtgggaacccataagaagagaattgatcatcaaggaacgaggaacattgtgctggaccagtggagaactgagaaacaacaatggattcatgcacaaaacaaactacttggttgtctcaaacgacgatgaaagctacttcacaattacaacttcgaatgaagagcatacgttttggacgctattagaaactgggcagatgataacttcgaatggagaagaggctgcaagggctgatctgtgttatggttacaacacagatggagggtgccaaaagtgggaggagatacccacatgcaggaatcctggtgacactttcgaagtcaaggaactttacttcaattttaaacacataagcaatctagctaatcggagttatggtcccagtgattgccgggctatttgctggaaaaattgcacttgtgatggatacacaaattattatgaagatgcaggaactggttgttcgttcttgcatttgaattcaacggaaggtgatacttttgcaattgggggcgagaagtttttgatattggtaaagaacacccatcacaaaggtaagtccatatgatttcatgacttcctacttcacattttttatactctttccgtttttaattataattatttttttataaattttttttttataaaattatttttaatttttagatgtattaattatttttctcctatatatttttaattattcttttttcaaattcaaaatatatttcacttgtaaatttaatatgattaattaaattaattattttttaagaagcataaattaatttaaaattcttataattagaacggagacattaatttttttaagaagaaaaatgtgtattttaattcttatgttttcatttaaatttgattttggttcctatattttcaaactaatgaatctaatcctctaattctttaaaatatgtgagcttaatctttttcgtgtttaacttaacatttagtaaggggttttaccgccataaagttagaaacaaaattaatttaactcctcctataatatcgcaagaaggttattgatgtttagaattatgcttttgtgaacacatattagtctgcaaagagagaaagaaaattagaagaacgaaaagtgataattgatgtgacatgtgataatgtgatagaaaaaagagctgaaaaaagattagttgttaaataaatatttatactgagtattcatgcatgtatcattgttgtaatattttactttaagtcacatctgtggtaaacgttatagatctggaatcacacttacatgtcttcttacatgtaaacactatgcaggtaaaaaaaagtggatatggataactattgtaacagtagctgctctattatttgtgatatgtgctaatttcattctatttttcgccttgaagagaagaaaaaatctgcttgaaggttagctatatctttccagtaaacgttgttccaatattttatatattgagcataatccttcattcactatttctatttctatatatcattcaaaattttatgtaaattaatagagaagaaaagaaatagaatgaagatgaagacgctagattcagccgttaaagatcttgaagatgagttcaagaagagacaagatctaaaagtatttaactttaccttaattttgtcggcaaccaacaatttttcaccagaaaacaagctaggacaaggaggatttggacccgtttataaggtgacgtgaaactattgactttgtgttgtaagctgtaacaagttatgacaaggaggatttggaccagtttataaggactaataattttttgttgtttagggaatcctaccaacagggcgagaagctgccataaaaagactttcaaaaacatctggacaaggaattgtggaattcaaaaatgaactaacgctcatatgtgaacttcaacacatgaatcttgtacaactacttggatgttgcattcatgaagaagagaggattctagtttatgagtatatgccaaacaaaagcttggatctctatctattcggtatgaaatatgttggagtttatttaattataggtgatgctttaatttggaagacaaattaagatgatatttttttaatcatcaagcaataattccaatgccatcgtgtagagaaacattaagttttcaacggaaattttcattaatgagaaatattagtaacacattttctaatatattttttaaaacacatatttattcatcgattgaaatttattgaaaatcataaaatttggtaatttaatataataactttttctcttaatttcatattttttaataaattttaactaagtaaaaaggatgtgttaaaagagtatgttcttctttcatgttatgggcgattcattgacttatgctttcctttcttgaacatataactgtgtaaatgtcatgctttgtttaacttttttccatcttgaacataattaattaactataactaaactataccaatgataaatattgctaacatattccaattaaaaataagtttgtataatctaacaaatgtttccgagatttagtaacgtacacatttatttttttagttggagtatgttaacaagttataattagatattatcttaaatacatcaattaaatatgtaattgttaacatatatacaataagtatgtatacattaaattctataatatatactcacaaagattgctttatttttaacacttgctttatttccattgagaagatagcactaaaagcaagtttttagactggaagaagcgtttcaacataatagaaggaatttctcaaggattactctatcttcataaatactcgagactcaaagtcattcatagagacttaaaagctagtaacatacttcttgatgagaatatgaatccaaaaatttctgattttggattggcaagaatgtttgcagatcatgattccgcaagtacgagtaggataattggaacatagtaagcttgcaaaactctatcatcggtttcaagtgtagttgaagaaacataaataggtttgttttgccaagttataattaaactctttttttcagtggttacatgtctcctgaatatgccatggaaggaattttttctataaagtctgatgtctatagctttggagtgttggtccttgaaattatcagtggaagaagaaatactagcttccatgaggatcaccctataaatttggtaggacatgtaagtgaaattagtctcaacgacttcttttaatttgattttttaatactattttctttatctaatttgactaaaatgctaataggcgtgggagttatggaatcaaagtgtttctttacaattaatcgatccatcacttaatgatgattgtttgatcctgatgaagtgaaaagatgcattcaaattggtctcttatgcgtagaacaagacgcaggtgatcgacccacatgtctcataactttcaatgctaacaaatgacagtgcagtaattgccatgcctcaaagaccagcattctatgtggaaagaaattgttttgacagtaaaacatcttccaagagttatatacagcttctacttaaaaattactacttccttgtaaatatataagtttgtggcacgagatatctattccttatttttgtttttataaaaaaattattttagaattatttcctgtaaatttttccataatttacttatatgttaggacaacaaaacaatatatatatatatatatatatattaattattgactattagatattaaactttccacctttaccaaaagatgttaaattttccaattgtgttatgtgctggtgggggagcatgcactgaatgacaaatattttaaccaaattaaaaagatttgtacctctttgcaaggctaagcacttgagaaacattggtaacaaaagatcagttctaaattaagcattcctagagctttgaagcccttgatcagaaaagatctaacagctaggataaatgcattaccacctagctagcgttcttgttggaaagaaattctattatgcttccctttaaaacaattatcacacttatgcaaatgtggacacctcatgccagacatcagacaacacatccattttggttagttcaactatgcctttctcacatgtaacacaacctttgatgtcataacttaactttttcaactagctagttccattgcatgaacaacatcaataaacatttttgcttgtgtcacgtaaaggttggaatatttcatacgtttagaaacaaccatagaacactttggtgagtttccaagtatcccgattgtcataagcttcatcacataccctagcccccaaaagatcctctttttgtgtttctaatttgtttcccttttttttctccataggacatgagtttgtgtggtttttgcaagtggaattctataatatttttatctaacaaatgttagtggttaatttattattttttgttaatagaattgtatagtggttggttgtcatggcagtttgcatgattctcttctcgatctttttttttccttaaagacatgagattattttgatttagatcatagatattttttattaagacaatctgacttcaatcttgtgaaattattatgatcaacaaatttttctctaaatatttaacacttatatacccaagacttgaatttgagtagatctttctcatggtgaaagagtttatgtttaggttaaaaaaattataaaaatgtttattatattattaataatattttaaattttctataaataatattatttaaaatatttcattttaaaaaatattttgttatgcatctttgttttttttaaaatattagaaacataaaaaaattatatttattatttaaattaaaagataaatatttataaataatgattattttatattatattataagattatgtcaatatattatttccggaaaatggtcatcctttttattttaacaaataaaatataattttattattgaaattttattattaggttatattatattattaaaatatatttttaaatagttatattaatttaattatattttaaatagtaatatttcttaaattttccattattatattatgttatagtgttctttggaaaattaaaaattaaaaaaatgatgacgcctaaaaattataatatagtcaattttttaataactattgtattattatgaatcatttaatctagtcttaatatttatttattacttcattgtaatgtatacataataatattatcttattaattgtaaaaatgtctaatatgaacatataaatatagaacaataattttaaattattatttatgaaatatttttataatgttgatattaatattttaaaaaaaatctctaattatgtttgagttagagaccaaaaatttggtttgaaatcatcgaacatatagatcaattagtgtggaattattttagtttaattaattgtcttagagtttgaatttatcctggatatgtagttatcaaataaggaataactttgcttccctaaaatggatactatgtgctatagaaaagaaaagaaaaaaaaaaaaaaacagttagaaacaaatttttagcctctaaaatggatcaatagcgactgaagaatcaattcccattttatttcagtcactaactgaaaattttgtctttaattcaataacaactgaaaaattattatattttaattagagaccaaaaattcaatgtttaaacatatgagtttgcctaaaaacacatatttgagttagagaccgtctattagtgtataaaatgagttaatagtgacaaaaaaattgtctctaattaaatttcaactagagaatattagtctctaattatataattaatttttaagatcattaacaattgaaacattagtctctaatagacggatttagagactagttattttggtttctaaatcaatttctatagtaattgattattttcaatttctaaatcaatttatgtttaataaatttcttgtgttaagtatactttgtttaccaacaatggttagtttaagtgatcggagtttgaacttcttaaacatgtgatcagatgttcgatttcttattggtaccatgaaaaaattattgttggaaagagacaactcattgatgagtgttaacagattctttgaaggagtttaaaagttttgataatcaatcgagatatttctttgcaattagcgcaaaaaaaaaaagtataccttgttttagaaattattggaataaaattcaaacatgaggccacaatgaaattattaaaaatacaattattaaataccaaaaaaaattattaacatatgtagccattctttatataagattagataaaatgatttacaaatttatggcttaaccatataattttcatggtaattaatgtgtagaagccaaaatgcttgttttttgatatcatgatgaagatccaaaatatcataaatattttggtgtgtctaaaatatttttggaaatgagagacacaaatgtaaaagaactttctcccttcatagaatcttggattctcacccctcctatggaataatttaagtggaaaacttaactaaatattctttttcaggaaaacttaattccaaccctcctaattctgcagtcattcatctgtgatggattcgggtatgcttctgttttctaattaatttatatacctttaatcatttgacaaaaaaaaacccttttatttaataatggttatcatgtttgatatcttcctcatttctaatacaatttgcttgtacaaagctcttcaatcactgttagcaaccaaagctgactgagacattaggctttaaatgggccttgcaagtggcacgagaactctcctttgataaaattatggtttaaactgattgcctacagctgttccaagtttggacaaagaagcaaagacaagctttctcctattttgagactatggaccaatgcagagacaagcttttgttcgatgactccatgtacagacattcttttctcatcaatgcatgatatttccaccctttacgcaaaaaaaaataataataataaaaataaaaaatcattgaattctgcttgttacgttctaataatttgtacgttgttgcgtgtttttaatgaagcaaattattgaattacgatacgattcaattttttttttttttttgcatttgaaaaaggttattctatagataattaatttcattaccgtgatgtgtaacatttttccttttacaagaataaccagatgtttttttagatggtgtattaatagatagtcaacccaataataaaacatctataactaaaagttttaggcctatcagtaaaaaaagttttgttattaatttttataaatgaaaaataaactcagaaagactaaagttgatgagtcagaaaggaaaggaaacgggttatcaaacaaagaaaggaaaaaagaaacgaaagaaactcaaaggagtattgtcgcctttttttttttaaagaaacaaagaaaggaaaaaagaaacgaaagaaatcaaagaagtattgtcgcctttttttaaaaaaaaagaaaggaaaaaaaaacgaaagaaactcgaagaagtattgtcgcctttttttaaagaagattgaattatttatatcatcatcaatgtactactgcaactactactatagtaattaaattatcactactctctcccttcaattattttaataagatagatctttaggaaaagttacaccactagatattattatttttgtggttatttttcttttaagttagtgtggcaattaatagcaatagcaatagcaataaattaattactaatattttattatttaagcaacattatttatgactaatatatattatcggtaaaaattatttattaagacaattattaagaatagccagtaaaaaaattatattttattcaaatcatatctaatttttatttctctttattttttcttttaaaaattgtgactaacgcactaatactttttttagtaattaatcgttctctttcttgacatactttctcgcttttaatcgttttcttttcaacaacctctctcactcatcacaatgactttttccaatcattcattttaatcatcctctttctcaacgacctctcttttttgtaatcactcaccgcatttgacaaataaatatcacttttataaaatgtgtattatctcctttttctaaaaacttatcaaaattaaggagaaaatagaagaaatggaagagacagaaaatgaagagaatccatttccctagcaaaaatgcttctcatataatgcttttagatatctctgtgtttattttttagagcatctccaatataaaatatctatttggatttctttatcaattttttgtggtctatgtggtatttttttgtggtccctaagtgtcatgtcactcataaaaaattcacccaatattttattccaatgcaagaaatcacaaaatactcaaaaaaatccacatatttatatttttttaataaaatttaatatttttttcaatttttataaatacaaataaaaatatgaataattgaagaaaaatgaaatataaaataaaataaataaaacataatgcctaatcatataaaataaaattttacataataataaataattaaacacaataacatcgaagtaaataaaaaatatagtgattcttattccatcaaacgactattttgtttatctcttgcaattttatgtttttcatcacttcctttttttttctccttttttgatgcgcatttcttcttcacttcctatttctttttttctccttctttgatgcgcctttctctgagccttcttcacttctccttctctgtgcatgaccttcttgatttcttcactcacttctccgcgcctcatcgaaggcccttcactcgagccagcttcctcgcgccgcgtcctctgttgcggtcccttcaccgtcgtcgggcgtccaccgtcgtggtcccttgtcgtcgtggtcccttgccatcgcgatccttcgccatcgcgatccttcgccatcgcggtccttcatcgtggaggtccttcgccgtcgtagtctttcgtcgtcgtggtcccttcgccatcgcggtccttcgccgtcgtggtcccttcgtcgtcgggccatcaggttagttattttccctcttcctcgcgctagtagttgatctaaaacgcatttctctctcctcaagtttgcgttccttatataagaaacacatttctcccttcaagaaccaattccgccacataagcactctacagtgcaagacttcttcacgaaaccggttcgtcatcttaaggaacgcttgaagataccgtgttggagatgctcttaatgttagaattttgtgatggttttatctttcaaataattgtgtttgtgatcataaataaaggaacagtagaagatatgagattgatttgatgataaaatgtgaacgaaaggagagataagttggagattcaaattctttggctgataaaaattaataaactaataattaatatttattgataaattaaataaataaataaaaggtagatatatcaaagaagaaaatgaatgattgagaatggatgtatacatggaaattgacggataaaaaagaacaaaacatgtaatgtatgttttatctatgatattgataaaatataaatttttaaataagagtgttcgtgggtcggtttgaatcggttttggccaaatttaggatcaactcaatcaaatttgatcggttcggttcggttttcagaagaaaaaaaatttgaaacacagcccattcatgaacggtttggttcggatcaccgagttacctatttaattttttaaaaaaaactattattttatatcacgattctttcaaatatctcatacaattaacataatattatcaaatgtatgaaagtagtaaaattgattcatataataccatcaacataatattctaaaataaacttataatataaattaaaacaaaagatttttgaacaaaatttagtataatagtctgaatcacaattgtttcttacaaaccaaattttgttataaccaaatttattgtaaccagatttgctaaaacaaacaaataaacaaaatatgattcattaatattataaacatgataaataaaatatgaaaaaaaagtgaaacaaataacgatatacctgaaagttttttaataaaaatgtagatggtcaatttaagtcaattgatatcctagctttccagtcagaagtaacacgtctcaattcatcaaaaacagagacaaaattggtatcctagtttcccatatgtgactttttctaaagtcaaaaaagaagaatacaataaaatagttacatttacgtttctattccttaagcaaataagtatctttaaatcctgatggagagttgaagaatcagacttgtcaaacgcttctatatgatctcacaacaattctctcaatgatgcaaacataaactctctaaactctaatattatttggaatggaatgcatacatgaacaccaaaatatgtttctatttatactaatttaaagaattttttaatacaatcctaaatatattctatcatagcaatcttaaaaatattctattatattatgcaatgcaatcttcaaaataatctatcatattttttaatgcaatcttaaacatttacaataccacacctttttttattgtcaaatttttaaattttttttaatatatatatatataaataataaaatttatattattattatgggttcacaggtttggtcatcaggtcaacgactctgtaaatctaaacacgtgacccaacccgtacatgaacggttttgattggttcgattcggttttgacctaaatatataaataacccaattcaaacggttcggatcggttcagatcaattcatatatacaagtgacctatactcatgaacacccctatttttaaacaacaaagaagaaaatatattaagaatatcccatacagcacaagttgtaccaatattggagcaaaagttacagaggttagagaaagctgaataattgaaaatagagtccagcgaataaacaaacattcctatcaccggcctatattacccggtaccgattccatcatcccacgcctgcaactgaaaacccattgatgtgtgcatctaatacaaatacttcattacagaaaaaaaccaccaccagtagatacttagcattgaaaatcttatacctcccacctactaccaacatcataagcatgtccttgcatagttatgtcctaccgatatttaaacagcactttgaaccttggagatttattcctttgtgcaataaatattaattttactaataattaatctttattaaaaatttaattgattatttttagtgaaatctttatttctattatgttttttatattacaaggttcaaattcaaaactttaattaaatatatcaaattcaattcagtatcactcaaatcaaaaatttgttagtaaaaatttagtgttaagtagatgaatttaaaatatcacaccgaataaagttaataaataaataaagcttataaaatagtaaaagccgacgaaagaaatgttatgtgggattgagggagtccattccaatatgggaaacgaagtaacttagaggtccatttgatactctatttgttccaaaataattattattatatgttattttatcatacgaagaaaaattaagaaataaataaaagcagtaactttataatattaatattataatatcattaatttatttataaattttgttgtacattattggtcttataagggatataaatgagaaaagaataattaatatcatattaaaaaactagaataacaattattttttacatgataatcataatgagacagactgaaagagagtattacacttcctaaaaatgtactttctccattttttatctgtcttttaagattattatgtaaaaaataataatttttttaattctaataaaatagtcacgtgatttcctttttgccttttttttttcttatttcacaataaatgcatgagcaaaataattaaagattagaaataagtatgaatataattgataaaggataattaatgtgatattgaactttgtagataagagataaataaaacaaattaaaattttccataatccaacaacacttgaaaagaaacagagggagtagaatatgtatctcctttttttgttgtcctgactcttcataattcttatataatagcatattatttaaaatagtatgagaagaaaaaaaatagaaatattaattataattttaaaataaaacaaattaaatgaagagactggttaaagtgtccaaagttagaattttgggtgcgcatataatcgcattaaatactcaatataaaacttttcgttcataaagattttattcaacttaattattattaagatgatcttcagtaaaaaaaaatatatgtgattaaaaaaaagtgtttaaagtggtgataactatattttgtcaccgcatggttgtcatagatggcataaataattattatattaattgaaattaatatttaactcttgctatagaagaaattttagtttttaaagattttaaaagaattttctttttaagtactgtgtaaaaaaatttgcactaacaattattagaaatcatcatcggtataattttaagataatcattataaaaattaacaaatttaactaatcatacctgatcatttgtaattaaatgataatctaaagactatttacattatatagactatatatttttaaaaaattaaaaataattaatttcagtcttaaataatcaagtcattactatttaaaagagacccgtgaattgtgaaaacatcaaaaccttacggtattcttaatataagatattatttagaagaaatagataatcatttttataagacattttacagtttctttgaagcatttttttcttattaaatactctacgtatctttgtgttttttattgatgtgttctattattttataatgtccttaaactttaatatttttatatcatccataataaattaataattattaataaggataagattgatatattagtaatattttgaaaaagtaatcaagcaaacttatgtacctatttttatcggtgtcttatattaatgacgggagggagtggtaaataaaggcattggaaaagtatacataaagaataaaagtatacataaaagacattggattagtgattatgatccaaacacgcaagtgtcttcttagaatgttttagcgtgtgaattgcaaaaacttttgaatgggcatcttaagatatggtaagatttgtctttcattattaaaatttatcatacttttagacatctaaatagtagaaattaacacttgattgacactttataagtataatgatgaaattaggagagagaaataatatataggtgttagttatgtttttgaaaaaaaacaagtgttcaaatattattgttttatgagattcttcctatgtgtgctctaaatttttacttttatacatttaaaggaaaaaaaatcaaacaaaccattaattattttaggtcttgaagacggacttctgaaaaactattcttttgttaaaactacttctgatgagtgaatcctattttgggaggttgatatatttacattaatttttctcgagtttaactcatgcttcttaatcaagtcttattcttaaaatcacacctgacaaatcataaaccaaaatgatatatattatattctcgaatttaactcatgtttcttaatcaagttttgttcttaagatcacacctcacaaatcataaataaataataatcttaagtcttgaagacatagaattacttcttgttaatttgttattattgaaactttattgtataaaattatttgcttcctcttttctctatctttatgtttctttttattttccacctaaatcttatattattattacttttactacagattgcttaaatgtgttttcaaagtacgatgactttgaaaaggagttaactaagtcatgaaataattttcttacaatataaaatcataaaaagataatataaatttatgtatattatattatttaataaaaagttatatatatgaaaataaaatgaaaactattataattctttttcaaaaaaatatataatcaccaaatttcaagttctcataaagtagttaattgcccttacataattttgcattatccatgagttaaaaggtaagttctatcgaacatttttaactaattagttaagcatatcaactttcactggacaaacttttcagcttttaaatgattaactgctaatttgacaaaacattgccaaacgttcactgagtgccacagcagcggcatctaatttgattctataaaagttatacacaacatttttttattttttttttgtgttgggacacaacatatatcgtgcaaaaagacgcaaatagaagcacatatggtagtcaataatatccataagtatagtgtagaaacacatttttattagaaaatttatgagaataaatattatatgttgtttatggtacatttttcaaagaaaaagagatttaagattggttgagtaattaagaaagaaagaagaaggaaaaaatttcaatttgatcacttttattaataaaaataacaaattaataaaaaattaatatttattgataaaaaaaaattatcgaaaggagttgttaccgacccgctagtggacaggaataaaggtgtaaccatgcaaattcattttcaccacccacaaatccaagctcaagttaatattattcaaattccaaaaattattaattgcaatggctattgacagtacaccaatatgaagctcacaaattggttttgaggatgcaaccctgaacttgcatgtcttccttgccacgttgtatgtaccttgctatttatttcctgcacgcattgaaatgtatcatggtattgccaagtttagaagacaacaaagaagtctcatcaacaactactaaagtctttttgcatgtatcaacttgtgatctcaactctaaaaacacagtaagtgagtgcttaccactagactaaaaatactagactaaaaactataattaatagttaggacataactttttatgctttagagcattagcctaggtgtcactattcagtgtaactcaaactcacatctgaaggcaagaagctgaattgttggaatatagtgtaaaatgaagttccacattaaatagaattagaaaaataagtacgatatatataagtgaggagaaaatacataaaatggataatgcaaaatttgggagcctcatgtataatgaaagcaaaagaatatgcatcaacacttctatcaattaaaacttcatcttttgtaaatctttataataatactatatcacaatatttcttgaaatgcttgtccattttctttacttattttttcaagtatggatttttaagtattttctttgctctctaagtgttggttgtaatttgtatgtgaaaaaagttaaatatcataaatttttggagctaatcaaaagacatggtcatggaattttatatgattgtgataattttgtatgtgtgtggttatttggtacacatatagtaattttgtacgtttgtgcatcatctatcatttaaagattacagaatcatctatcaaatttaaatcataattgatcatattctttaattaagaaaagatagaaggagaatctccacaatattatagataagaatgaacttctctctttgaaagtagtttaatctttagttttattcatatctttttacgaatttgtgagaaatttgaggcttttgaaagctgaatagcggaacaataccgttaggatgaatcatgatcattgttcttgctattgtatgtctatgtttattttttataggattgttagttttgttctaatcatgagtgactagccccctaatcaaagattatgatgtaaatgtccaaatgtattcttatccttgttcttaatgaaatttttcatcattttatgttaattaattattttccttggttaatgtttatttgaaaccggtcatactaatactcaattaattgtataatagtgatcatctgcatgtaattggtagatctagaaaatattttttgtaccaaattgcatgatcaaactgttttgtaatatccgataaattagttaatctttaattaaacatacataaattaattttatcatttgacttaattgataatatatgatcattagagtattgatttaagacaaacaacatttctgatcttgacttagtttatttttggaatccacaattaactaggaaagatatttcattggaatgttgatttaacgcacgtcaacttttagcttttcatccttttaactaatgcatctaaaaataaaaaatggataaaaaatttcaaaaaaaatttataattagtaactaatggaataatagctaatttgaccaaacacattgctaaacgttcgttcaccgagggccacagcaaaaagcatctagttgactattgaggacaaaacagattccatataactaaagtcacagcagttggtagacataaaaagcaaaaagacgcgaatagaaacacatttttataagaaaattctagagaaaatgttatatgtcatttatggtacattgtacagagagagttgttccagaccctctagtggacactaacataggacgaaccatgcaaattcattttcacgctccaattaatattatttgaattccaaaaattattaattgcaatggctattaacagtacaccaccatgaagctcacaaattggttttgaggatgcatccctgacttgatgtcttccttgccacgtggtatgtaccttgttatttatttcctgcaacattgaaatgaatcatggtaatgccaagtttaaaagacagcaaagaaggttcatcaacaagtagaacagtaatatcagtctttttgcaactagcattgctcaaatctaactaaatgcccgagtacagacacaaaccacaagggatggttgattttatcatttcaaggtataacacttcaccgtttgaattcctccaagacactaaaattttataaggatatccgtctaggaatcttaccaagggagtttaaaagtatctttccaccatccttgttttgagcaatttgcaacgattttgtccaaccgtgaaatgacctgagaaaatgttggcctgacaataggtgttggatcccaacattcctcaatcaacctgcatacaccatgatactaagaccgttttttaaattaaactgaagcttgaagacataatttaacttcaaaatacactaactctttcaactcggaggataatgttttgttttgatcttgaatgctggtcttttcccttctaagcacatcagtctaactgcctcctccgaggacatgggatggaagggatgtgtaccctctatcatctgggtccataaagataataaataaaatttgttgatttcaactaatatacaataacatatgaagattagagagataaatttagaaaatctaaatgattttggaaaagctagatttttttttttcatgaaaacagaagtgcatcagtaatcttagggaactacaatgttacataacagacaagaaatgtcaagacaatgttgtcaaattcctcatccttcccccagcccatgcccttctgagctctgtagattgagtgtttaccactaggctaaaaactatagctaatagtttggacataactttttccactatagagcattagcctagacatcactgttcaatataactcaaactccacgttctgaaggcaagaagctgacccaaagcaataaaaacaagaatctcaaagaaaaactaattggaaaactaattaatctgatataagaaatcataacatgatgggtgatgcaaaaatctggtacctcgtatataatgagaccaaaagaatatgcatccacacttctatcaaaaacttcatctttgtaaatctccggtgccacgtacaagcctgcaatgaatacagccaaatcattaattgaaccatgagagatacttttagcaattctaatcttcaaatatttttattagactaacatataaaacactataatgcttgtccattttctttacttagtttttcaagtatagattttcaagtaaattgcattgaagggccaagggaacatcatttagaaacagaacgagtatcgagctatcaatggagaaaattactctccaggtgttgagtaatttgtatttgaatctttaaatcataatggcagttaatttgtatgtatacttcattcatcattgaaacggaaattcctattgcattcacaaatctaatatgttgaaccagttacaattaaactgaatcttaacgcaagaaaatgggacactggaaaacaaaaaccttcaaataaacttggaaggagacaaaatccaagaatttttttttaaaatacccaaaaacttacttgaaagatcaatgttaggctcaggctgtaccagctttgcttcatcaggtgacattagtgaaaatctcacagtgccaaatccagctatcttcaattgccctccattattcagcaaaatatttctggcaccttaccaaaatttcatatattaaaggaacagtacgagaaaaaatctaattcaaaatgcactcacagtcataaataaacatcaaattgtattaagtgatcttactttggctttaaatcacagtgaataaccggatctggtttgcattcatgaagatagttcatgcccctgctaacaaaaaaatatcaagatgtcttgtataaacaatctggcagaatctccaataaatttataatcatttggtacattgtaagcttagcaagctaagaaaatgaccaaggcgacttttagaaatcaatgaccaaccatataagatataatagaagtaagaaaggacattaaagtttttcaaagatgattcacagagatttcgtacagcatagttccttgaaatggttacttgcctggcaatatcaagagcaaaccgtagaacttttgatggagacaaacgccctttcttttgaagatagcttgccaggtcaccctgaaaaatcaacattgatatgagcaaagaaaagtgagttagatacaagaaacttattttgcaaagatacagagaacatagagggtaagcctaccttagaatggtactcacgcacaatcatcataggtatattctgggtgacagctccaacaaactggaccacattcggatgtcgcaccctttctaataatgtgagttcatgtttgaaagcatttctgtgtgaattattgaaatggtcaaaatttagagccaatgttgagtaattaagtacagaaaaaaaaaaaaaaaaaaaaaacagctatttagaccataatcaacttgaccagaaatcaaagtgaaaagtagtgatatatgcagtcactcggacaggaaaccagcatcaaacaacccggttgattggcaagaagcatatcatacagacactcacaagtcacaacaaacattttcaattgctaaggtgtatacatacatggtatcaggatttgaataactgtccttgtcaagtatcttcactgcaacctttgtgccattccatttagctacttggtatgttccctgcaaacagattgaccaaagaacaatgaagaactaaacaagcaagtttaacccctaatgtcgaatgtttatagatacattaactcaattcccacaagtatcaacaacttttattatacatgaagcatcagcacattaggtaccaacaattatcactttgctggtattacttgtaataaaccaaaagaacaaaatttaacaggaaaaatgaaagatttggggaaaaatattaaaataaaaataagatagttgccaaaggaagcacggtgcataggtcgcgaaatttggcaaagcaaatatttaatgcacagtagaaaacatcacatgccacattactagtcatgcaaattacattactaaagcaaaatgttacagcacagaatctcaattgaccaatttgaaagcaacaataatgctccctcagagtgagaatagttgtgtcagttgcaagaatcaacatgccttaatttccatgaacaaaacaaataccatgtccaggtggaatccaagttgtctaataagccaaaaaagccataactattgaataaccaatcaaatgtaactaagtgaaagaaagagaaacatacctttgaaataccatcactcttccgaacctgtagctctaacgggttgagttcatattccggaacttcacgaggattcgcaacagtcattggagtcttcctggttttctaaccacgtcaaagataactaatcagtaagtccctaaactgaatccaacatatttacacttacttattgatccataacaaacaaataacgatagaacaataccggcacttttgctccacgagccttcaacatgtaataaatttctgtatttccataatatttggcatcggccgccgcctgcacatccacacatccatcaccacttaacacagaaaatcaaataaattttgcactctcatccgatctcaaagatttgtatgttaaagtttattgatttgtttattgtttacaaattaaactcatcttgataataacaaagtttaattgccaattgccatgcactttttatattagcaaccaatcaaaggtcagatgaattttttacagtaatcatcataggtatagtttattgaattttatgtaaactaccttaaaacttaaaaagttatatctgacataattttttttatcaaatgacaatataaagagtgattattttcacgatgatagtgtcatcgtggatataaacatttttcatcatgagtagaaacactctttaaactttcagcatacagagttgtaaaactaatttctcttttaaataatttttaaaaattaacaaaattattatttatgactataacttttttcaataataagataatatatggcgaggagagaggagagagtgaaattacggtgctgccccagcgatcgcgagcgtcgaggttggccttgcggctgagaaggagcctgacgacttcgacgtggccttcgcaggcggcgacgtggagggcggtgcggccgtcgaggtcgatgctgttgacgtcgatgccttcgttgagcaaatcctcaactcccttgacgtcgccgcggcaggccatgaagaggagctgcatggtggagtccaggttctccggcacggtgagctcggcgttgtcggggccggggctgcggcgaatcggatcgagcgaggactggcggccgaagctgaagcgctggttgatccgccgcggatccagcgaggcctgccgcgtgaactgccgcgagaggttcctccgcagcgaacccgacgagaactgccgcgagatgccgcgcttcagctgcgcggcaatgctttccatgccgccgcccagtggaggagaaggaagttgcaacgcaacaaaataaaacttctcacaaatgaaaacaacaaagagcgcgctctacatgttgatatggaaccaaccctgtgcaggttaggttaggttcggttcagttcggttcggttctgttattccaaagagaaaatgaaatgaatcacgcgaggaaacgcgattgcgagaaagaaggcacggatgtctctctctctctttccatcgcttctgaattgccgcaattagacgagggtggtgtgatgcgtccatgtgtaggggtagtttcggttgacttacggggactatcatggttcagtttttttctttttttttcttttctgaaaaaaataataataattaggccaatatactctgacattataataccccgttatacctgtacgtaaatgcttggacccgaccaatgtagcaaaaacaaaacatttgtaatattttttttttactctaatctattttataacaaattaatgtatatattaaaataaataaaacttttttttcattttataattgcaaaactagctctcattactaactgtagttaatatgttgttaacttccttacacttttctctatctatcttcaattattatatactagtcgaaagatcgaaatattctgtacttttctatattttttaagatttaaatacatcatgtttttaatttagttgttattataaaaaatatcttgttattttggtttaatatatatactatatatattgctttttaatctctatcatatttttgttcgttttacattaattccttttaaaaaataagcacacactaaatattttagtaaagctttcaaacagttaattggatcaaatctctatcatattattgtccacttgtttatttttaagctcacactaaatattattagtaatctctatcatattattgtccacttgtttatttttaaacacaatttcaatcctaaactttgaagtcaagcgatgcatgtgtgatatttttcagtaagattttaagtttaaattttatctcctaataaaacctttaactagagagttgactcaaatgttgtagatcatatttctaactcaatgacccacgcagtttgactcattcaaactatttttcagtatttttaataattcgatcagttcgtatatagataatatataatataataataatacatgcaattacagtgtaaagaacttactctattattcaatcacatgataattatatttgataaatttattatttttaatataattaccttaaaattcatactataaatgttttaatcagttaaaaatatacacacttttacactgaccatgtaaactaaactccataaataatatatttttggtaatttttaaatattaaaataatttatagaatttaattaaaatgactaataatatattaatatggagatgttttgcatttcatttaattatacattttctgatctgttgattttataaaattattttaaaaaatatatttaaagtaatttctaattaattgataaagcactaacatgaaaattaaactgtaatttaaattcaaattaacttgctgcaaatataacaataagtctctaataaaactataactaaacaaactttcaaacttaaagtgaaagagttcatcacaaataatgtgattaggcatattagttacaaatgactcgtatataagccaaaaaaaaacattcttatatttaggcatggcaacagggtggtattgcgttctcttccccgccttgactcaaaaccactccccatctcgccccaatttccgtcagattttaaaatccatctccatcttgtcctcggtatttgattaaaattaaaaaaaatatagcttttttattgaaaaattggatgaaaaggctaattacttaaaaaaaaaaaataacaaactcacattaaaaatatggatcataatttaaaattgcaaaacaaatcaatcaattcaattaaaaattacaaaataatatattttttttttttttttaatattatttattacgaggcgggtgtgggtgctgggcggataccataatccatatccgccccgcttttggctatgggggaaactcgaacccgaattgataaactcgattttttcccgttaaaatcagaacagattcagtggtattcacggattcgagtccgctgccatgcctattatatgttgaacttaaataaagtaaatttaaataattttatcttatttaatattatcattcttaaaatactctttaattaattctaattataatttcagtgactttttttattcatgaaacaagtccaagaataacattttagaaataatttatttttatatgagattagaaaattaaggatgtcaactaaatttttaattagtataaattattatttttgtttatatacaattcaaaggaagtaccttttgccataatcaatttaaaaaaatcaattataaaacgtatcttttatagtttaattggaaatgtctcataattttttttatttaagtaaaagttataaataaaaattaaggaaatttataaatagtttttatactaataatatatttttactttatagaataagtaaagtacagaatttaaaaaataaattatttaaatcaagacacgttttcttttcgatgtagtgtgttaaattcaaaattttaaaatcaaatttagattaagatggaaaaatcttaaatttaagtttgcaaaaaataattatatgttgacagtgtaaaattttttatcatatagtttataatatagaaaggattatattattcaccttcttataataataataataatatattttattaaaataagtaaaaaatatataaagcaatttagacaaacaaactaaaaaaaagtttcttattttattaaaataaatgcttagtcaataaataaatttaatcaaatttatcatatactttgtaatataggaatggattatattatcaccttcttataataataataattatgatgatgatgcttttgctttaaatgtttttattatggtctaatttggtgttttgaaagaaaaaaataaaaatgtgaatttgatacaatgctagctagtactaattaacgtattatttttattaactatatttttaatccctcaaattaggtcactttagttttggtgtcgtaaatttgaattttattttttttagtctttaaattttgaaaattatttttttggtctctttcacagtaaaaaaacatgtcacaaaccataccttcaaactgtaaaaataatgcagaaaggtctaaaaagttaatttttcaaattgagagacagtaagagataaataaaaattgaaccaaaataaaaataatataattttaaataactaaactaactaactgtttctctttggatagctccacatgaaactgtcctcttacaagttttcctaaggataagcctgtactcaagatattttgatgcacaaggccatagcaatttacaagtacatggaattaattggctacccaaagatgaaactaatgaaatcgaaatgtctccatggggtcagcgacgacttcataattaagtacgaattgtgtcgcctctgattagattacatgtgcaaaaatacaattatgtcggcttggaccaacgtgtgtttaaaaataataattactacatgttgataattctgctatacttagtttgttttttgtttttaattgcatcttggtgacctatgtctttggaattggaatacttgttaaggaattcaatttttaatgaaaaaaaatgttttttttttttttttattccttcaccatttgctttttttttctgtcaacaaaaaaaaacagccatttgcttcttcttttttattccattgttcacttatttttgttttctattcttttattacatcatttattttatatgtgactatctttcttttttttttctacctttttcattacatctgctctagtacttaaggtatctcacaattaaaaatttaagaatactgatctcttaagttgcaaaaaggttaaattagtttatcactattctaatttatttttaggtttgattttgtcttttaattttttaaatttattttgatcttttaatttttaaaattaattaaatttaatttggctatctaaattaggtcaatataataacaaatcataatttgtgataacttaaaatcaagatcaaatttgaatgatatgatcactcaaattattttagatagtagtatctaattaataactaaattgaaaaaaaaatgagaggattaaatggaaccaattttaaaattaaatgatcaaattgaattaaaaaataaataaaagaccaaatcaaagttaaaaataatcaaaggaaaaaaaaagctaatttaaccttaaaaaatcatttaagtaacttttttcccaatatatacacgaaccttaaaaccaatttttaactacgcatgcaatacctcaaaatgaggcctacatattaatcacttctcacctaaaaatggaaagataaccacacgatagtccttgtaggccacccatactaaagcattaaagagattgaaggtttcctttcttttttgcaagagacaagaagatggacacctatgaaatgtcattttgtgcgagtatcacatgatcgactcattttttgtgataaaataatatatttagtagtcactctatttataattttgtctttcttatgtctttttttattaattttctatttgcctcgtctataaatgtttatgcgtgtctcttaagaatgggatatatatatatatatatatagaaaaatcttgacattttaaggaaataagttacaaacttttagtatttaaaaagactaaaggtatggattgaattgagattttataagatttcaaaatactttttgttataacaaagctttgcgtatctaataatcttttaaaataatataaacaagtattgtagtataccggtacttaatcacgataaaaataatttattgaaatatcaaaattggtgatatttaattgacacttttataatttaaaaagaagtctctagtattaaaaaccatataaattttaatggattttgtatacttttttagtgatatataatgtcacatttgtccaacaatcacattcaaattcctaagtctttttgtcattgcatattttattttctttaatcacaattttttttccttgaaggtggtataaaatattggtacaatatttgatcatttattttttcccaatagtaaaaaaactttctactatttttgtctttaatcaacttgtttggatgaattaaatgaatgtatcaccaaaaagataatgtaaaaaatatataaagatttttggatacttgaactttttggttgcttgatcaaaacaacactgacaatctttactttgtaggaagtatattatgaatcgattcatttataaaaagagaaatattaactccaacaaaattaaagttgctacttttgacacgcacagtattgaaatttggactagtttctctttccatttggagagcaacttggtaggttgcatttcaaaagtgagttgtcaattgcaacaccggtttctcttacagtgcagtggaccctttgcattatattttattaaataaatgaaaagttgtgtctttaaaatattgtgggattcattttgagaatctttagtgaattttttgattgagtaaattttgattggattgtttagagtaagaaaataaaaaatatgatgtgatattatagagaatggtgaaatgttattttaaaaaatagaagctaaattttgatggatttgttggttaaaaatgttctaatggtagaaagttttttcttgcatttattttaatgtgcatgtcagtggataatgtcagaaccatattgacacacttttttaaatactttatgtaattaattgaaatttattaaaaattacaaaaaattaatgaatctcacattttatttaatttaatgattctcacttaaaatgtattgctaacatcctcttataaaaatattttcccgttgtgcttttttttttttttaatgcaatcacgttgttgtgaatcaccattgtggttgtgcatggcaatttaaaaacattgcaatgaatagtatattcaggataatcatttctcagcccttagtgtcatagtggttgttaaaagatgactttatactcacattggtttttgcaatctgagaatccaacttcaaggtaaagtgtttgaagacacggttccatggtatagcaattccatggaaaattgccagcatacagagcaaaaaccaatattagaggcataggaaaacactacagtacctaaacactcctcccacacccacagcatctttcgtccttcagataagcgtcataattcagcttaaaatgaccagtggaaggatgaatataccgaatgaaaatgaaaatgtatatacgatattggattatgctataaggtgatcatagaagaaaattattgaatatatttaatatatatattaaatattaatatgtttactgttaacattcgatattatgtcgtaatatttcgaacactcaacacaaatccttctctttcaaaccccttttaccttcaacaaaaatgaccagaaggatgaaaatgccgaataaaatgaaaatgtaacatgtcactccaacaactttgaataggggactcgctcacgttgctacaaaatttccgacagccccctgctttgaatctacggtgacaggaagagcatgatgtagggttagagtttaatttttatttcacgttacatcatttattataaatataactggggaggggttgtaattttcactttaaagcaattaaaaggtattcaaaaggatttttacgaaatttattcgaacttacaaaaataacttgcgattcttataaagtagtatttttaacttattttgataacttaataattaaatttgggaacggatacacttattttagaatatatgtttttgacactcatattatacttaaaattaaaactaaattgtaaaataataatattttatttttataaaaaattatgaagttgttttactataaataaattctcaattcaacacttgaattaagaattcaatctttataaataaaataagttaatcaaaatgcaggaaatgattattaggagaatcatattcaatttttttgtaagtataattttttagttaataacaatcacgtaatacaaatcaattaattttgatctaatagataatttgaggctcatgtttttttacttaaaaaaataaaataagttaaacttcctcgtaaatcatttcccattataaaattggcataattgaagcttaataaacactatcaatttgaaataatagtagtaacaaacgatctttttctaacataaaaaaaaaaagaaataaaaatcgccgcagtgcagtgaaagcagtagtagaagaagaaaacacgagttacgcacaaagacacacactcccggtgccgccaccaccaccattgctttcagtctccgaatggcaaccactctaactccaattcaaaccctcaaattccgttctcccaatcccaaacctctctttctcccaaacctccttccatctcacacctcacaccttccgcgccgataaactcactctctccgtctccgccgccacctcctccgccaatggttctccctctccccctcccccgctcgctcaaagtacgtcctcctattccattccctttcactcctctgcgtccgattaattactgttctgttctgttccgattcattactaattgatgattattattgacaatgcagggttcgtcgacacacgatttccgtgttcgtcggcgatgagagcggaatgataaaccggattgccggcgtgttcgcgaggagaggatacaacatcgaatcgctcgctgttggcctcaatgaggacagggcgctcttcaccatcgtcgtgtcagggaccgataaggtgctgcgccaagtcatggagcagcttcagaaactcgtcaatgtcttaaaggttcaccgtctttttcgtgacataccaattccgtataactagcgtttttattgggtgtttttgtgagatgccatgtggagaaagtgtttgatagtgaaattagtgagagaatgaatctgaaggaaactgttgcttatgctggctaggttgaggatctttcgagggaaccacaggtggaacgtgaactgatgctcataaaagtgcatgcggatccgaaacaccatgcggaggtacctgcttagtggtttgtggttgttgtatatgtatgcatctgttatgttatgtgtgtgtttattttgttgattgcttctatttgtttatttttgctggaatattctcagttgaagtggttggtggacatcttcagagctaagattgtggatatctcggaacattcggtgacaattgaggttattgctggagacctttaaatatgttttaatttttaatttccatgttttagtgcatgctctgtatttatatgtactcaaatcaattggatgtatttatatgtactcaaatcaattggattgtacttgtaaagtggagaaaaatatcattgttgtttcattaagataattatttactattggaggtgaattgtgttatgagagtatggtacagtgccttgtaaacagctcatcttgggaatatactacatgtattcatatactcttccttttattgcataaataataatggtgtaattacgaaactaaggttggagtatgactataatgtggttgacttgttggactggctgtttttatgttattttgttcttgataggagtctttcatttttacataaaataggattttgctcatctttaaataatatcatgaataaatagtgtgctgatatgagctgggtagatattttttaaccttatttgtgcaagtgtttgtttcatattttgattattttcttttccatctacctattacttagtcacaacacaaccattaccatatcattacttgcaatatgtcattagatattcttggtgataaaatcaggtcgtaatcttgggtgaattgttctgctaatgttacaggtaactggagatccagggaagatggtcgcggttcaaagaaatttcagcaagtttggaattaaagaaatagccagaactggaaaggttggaaagttcaattgaatacccaacaaatttccttaacttttgtatcttgtccattttgttgagcattatattgtaaggctgtgcaaaatttactaattcattattattggatgatgtaactatacttagattgcattaagaagggaaaagatgggtgcatctgctccattctggcggtattcagctgcttcttatcccgatcttgaaagaagaacacctgttaatgcccttgtgggagcgaaaaatatgaaacctgttgccaaacctgatacacctgtgggggtatgatcttatctactcttcaactctacggtttcctttctagacctatgtttgaacacttcaacttgaaaatttaaatgttgtagcttgaaattaaataattggcatatcctatcaaaagtgttaaatttagaaatcacaaacaagcttagtttcctgaagtaaaattatgctagacaaatattgcaaaatggttttaacacttatgcatatctcaaacactattgatattacagctaaaggtcttttctattgaacatcttttgtccatgtgctttggaatatattcttgttacatttaggttgtctttgactctttccttaacatcaattgttctaatttttaagtttatagaatttcaatgattggctaaagaagaacaaatcagtaactattgcaaagaatgaagctaatgctgacataaatgcactccatcactacatgattgatattttccctcccttctgttctttgatttgtttgctcattattaatttcaaatatagtctgactgtttcttttgacatgtttgcttgtgtgaagggagatgtttatcctatagaaccatcagatggttttacagtcaatcaagttcttgacgctcactggggtgtcctcaatgatgaagatgtaagtggtttgtagtttcttattgtccttaaatgtatccctttttcttgtttccttctaatacattgtagatatatgtacattatcttcattagtttctatttgagtttttggttacatagttgaatatatttgttagaaaatatatggaaatatcctaaatattttattgagaataacctcttttggaatagtttcccaattccttattacctcttaggattagttaccatatttctttattttatcataatatgtttccttaattgattatgattatgatcaatataaataaggcttagtacttttaggtttatgaacatgtcaacacatcaatacattataatacgtctcagttactatcaaccattgcttcattctcttttatctttcttcctcccttaatacctaaatccccagaatcaaacatggtatcagagagggtaccgttctctctcttctgtgccttcaatactatgtttattgtacattagcatgtaatattcatcaattttctgaatgacatgcttgtgactgtcttactgttggtgggataattccttcagactagtggaattcgatcacacactttatccatgcttgtgaatgatgctcctggagttctaaacattgttacaggagtttttgctagaagaggctataacattcaggtttcctttttattttattttataatatttgtgtacaaattgcaagcacataagtccgatgttttggtttctctgttttctcatcttgaatctgctttgttatttccagagtttagctgtaggacatgcagaagttgaaggactttctcgacttacaactgtggttcctgggacagatgagtcaatttgcaagttggtgcagcaactctataagctagtagagctacatgaggttcaaaatgtctttgaaaaagaatgcatcatatcctatacataaattatttgctttgagtaatatatattgttagtgttgctgtttgcattgtcctgtagcactttgagtgcctgtttaagttttttttggagaaatattcacatacttttgccagttccctgagagaagtttaaaataaaaatgcttccgaaaaaaaaaaaaatcccaaacacctactaagtgcagatctcccatcagtgtcctagtggatacagaatttgacatatcaggtttagccaaacatgtgaccctgatagtctacaatgtcacacaactaagtttttttttttttttttttttttttttttgcaatttgtgttgaaacttttgaagtggaggaggaaaaggctaatgcttgattagcctgaaactgtaattccgtggtatgatcctattatattgtaaaatcagcagttatattaggtgttctaaattgcagctacagtaaggatttaggtgtattaggttaagcaatttgtcaaagttgttaggttatttctttaagctaccgatttcaacattgagtatgtaatccttgaaatcttcattgatcatagtgaccttcccccttgtttttgcccatggacgttagcctatagtttactgtacaaaccacattaaattcctttctttttttgtttgtgcaccttgacatgactactagcacaggacatttgtcttgaaagcctttgttggaacttgaatattagcagattttgtgtttcctaatattatgtgaataataaaaagagtattctgaaacttgagatcttgcactggtcttatttttagaatctttactagtttttggaatctttagtatagttccagaattcctatcaaaaaacattctatcaaatctcttacttgaagcataaatccttatcttcctatcttctgtttctttcttatgtattttacctttgagaatgagattgatatagagtgcataaatatttgaccatttttaatgtttacaaaatctggccattgcattcttttctgtatttaaactgatatttcttcaggttcgtgatatcacccacttgccatttgctgagcgagaattgatgctaataaagattgctgtaaatgctgctgcacggcgtgatgtccttgacattgctagcattttccgggctaaagctgtagatgtatctgatcacacaataactctggaggtgaattttatgcagacttttcaaccaagtgatatggcatcgtatttaatgtcaacttatgttgatactcataaacatggtggatactggatacctctatatgtggagagaatgttgaatttagtgactatagtgtaattacaaattgcactaaaaccaattttgtttagctaaatgttacattgttactgtgctacaagttcataggattatgcatttataccagtttaatatctgttggatcatgcatcaagttttgttcaacagccaacgaaaccaccacaaattgggcagggtactagagccccaatggtcctcagtttatcataaagattttttctcggtcatgaaaataaataacattaagctatttatccagcatcctaacattctaagaatcctgttatgcccattgtctgcagctttccacatccatttttttcattgacatgataagctatcagcaatagaattgcttttcttctcatgttaacaaatataattgtagatttaaataagaattgtaccctaacctttgtaagtaactttatttattcttcttccacattaattaatattaaatacaaaagtggggcactgaaatgacatttttcctcaaaaagtgtaatgtagtagaagttaacaactgatgacaccatattggtgcaaattctcagcttttcttctaagtcattatttcttccttccaactacgcctatggttattaaaacaacaggctactgcttttttcttaataaggttatgctgatgacaaaaaattggaaatttgattttatatttatttatttgcttcaaagtatttgctagttttgaaatgtctgccatgatgacgtcagatttacagatcctttattattttgatttttaactaattgatttgcttttgaaccagcttactggagatttggacaagatggttgcattgcagagattgttagaaccatatggcatttgtgaggtatgttttataaatttttttcacttaccatagtagatattttgctagacagtgacttgtttaaattccttattccataaacttccagagtcgaatttggtgcatttacttcctcaaatgtatctcctgattctgtccaagattgtttactcagttgctattattttgttctgaggttttcctttgttttatgggtcagaatattcatactggaggaaagaactcagttttgctggtcttggctaagatgtccttgttttcttttgaagctctgtagaggataagaataggatgagccccctacacaggcagttagctgagtcattcttacacgtcgatgttcattttttattatctacaaaacacaccagtagccattattttaaaaaccaaattagggagtataacagtcaaagaagagggttaagaattgcgtttcaaacagaatttggagtacatgtattttattaaaatataaaaataacaaaatacatcagaaaaaatgaaaaatataccacaatgaataaatataaatttataaatattaaaatttagttttttgaataatttttcactatatatgaaatttggaaaatccttctcaaagtataaacgagtttctctgtagaacaagcagaggtattcacctttaaattttactatattatgatcatgatgcactttaaattcaatcaaagagtgaatattctggcaaatgtttactttgaaccttttccttaacattttgcttccttttagcaaaaggaaaaaaagctggccaccgtgcatgctatacttggtttggtttcttagtgtgctgtgcttcatcctaaaggttcaagattcaaattccattaggaacaagtgggtgtgattcctctaatggaaaagactgttaaacagtcatttaccaaacctgtgctggatcacactcaacagtttagtgctgaaccggccagttgtcaccagttcaaggctagtgcagttctaacatgtaatcggacacaactggctggttcagtcttgttttaagactggtttttgctcatgctcctattgcaccggcactctttactttgaatcagtctttctgatgtttcttattgtttcaggtggcacgaacagggcgaattgctctagtccgtgagtccggtgtggactccaagtacttgcgtggatactcttatcctttgtaatcactttcacctgagtggaagaaccatcaaagtcttaggattttagagcttgtactttctcttaaactttgcctacggattcttgctttctgaactataatgttaagtctttcagtgatttgcaaatgtaggcttgggatgacattgagattaaaaaaaaaaaagttttcctccttctctcaactttgcttcattttttggttgaattacagtctactgttttgtgtagggacaaattttttacatgtcaaaatatttatgtttcgtacttggatgttgtctgttcaaaattaaattccttatattaatgctatcgagtcctatgttgtatgcattaggacattaattttattgcttatgcaattgtgatgttttaaacatatcagtaatatttctcgtattgatttcttatgtttttcgatgaagaataattgtcttatgataataccaagttattaacattgtgttatttatatctatcaatacaaataatggaaggttccaaaatagtcgatgtattattaccaagagtaataaaaattattaattgatagtgcaggattttatgaaactaattgaaattcacttgacattcattgattgagtcaacaatttttttcagagtttttaatgtgcttttattcataaggtttttaatgtatattgatcaaatattagattttgtgtgatatataaagcttaattgtaagttttatgatcaaactttattattttacaaattttatcataaacttttcataattttgtgaatttttactattcaacttttaatattttacaaatttttctatccaatttattatttttatgtatcttattatcacggtaatgatgttttattttatttttaatttttatttgtgacacgtgtaaacatgtaaaattaaaaaattgagtaacaaaatcataaaatgaaaaaatttataattaagcctaatataaatattaggtgttaagttaaccaatgaactaaaatatgatcaaaagtgaagagataaaatttacaaaaataatgataataacagacaaaatgcaatcaagtcaaattaaaaatgtaattataataaaataatgattaaataataaagttaacagtacacatttttactaaaaagtataatttaaccctttaatgtttgttattttaatattattagtcttaaataatctttttggctaataattaagttttaattattattttagtcttttaagattttaaatttaattttagtatctactatcaagaaagtaacaacattaattcatacataataaaattaaaataaaatccattgacttatcacatcacaagacaattatgtaattttgttataataacgtttttaaatcctggtgagtttatcatcatttaacactactacttaatagaaactaaaaaaattaaaatcaaaacaaaaatattttaaatgactaaaatcaaaacctctttttataaagactataaaaagtttttataattttttacatatttgaattaaaatgaagattaatacaacccatatgaatttcaactaacgaaagataaaagtttccaaacacaaattgccgggggatgaaatggttggagagacgtgcaattaacatttaacaacatgaaaataacactacattaccaaactaaaaccactgcagcagaaggcaatgtatgaacacacaacagagcttctagacgggaaaaagttccccgccacacaaatcttgtttaaaaaagaaaatatttattataaacgttaataacattcgttgtaagtccatcattacggaacccatcagcaacagatcatcaccgagttttctttactcttctgcagcactagcagcactaagatccacactgaggtcaataacctgttcaacattaggagtacaagaatcagcatgttacccaattaccaagaaagttatccaggaatatcatcaatgtttttcaagatttcccatgcccaaacaggttgctagtccacccataaggtttctgattactcaatggtattaatacaatagcaacaaatacaaaatcaactagaatgttcaatatttttcattcaccgccattcttcaatcaaattattaacgagtctacacttagtttatttataagaatcagaattcacgaaaagcaagcaaccgattttggaatatataaattttcatattaagaaaatgattggttaaagaataataaaagatcattttattaataaattacatcactgaaactgctaaccatcaaatttccagtgaggcatccattgtataaggaatagaaagatgagaataaatttaaaattcattgtataactctacaaaacgacaattagatatccaactcattctaaaatgatcaattaaaatttatcttagccattttagcttttgggagtggggaagaagagaatctaaggatatttttaatttgagaaaatgttctgttttcatttcttattttcacttttaattacaaaaattaatctaaggattcctacagtatgtagacttataaatatgtgatacaatattataaaatacagtactattgtagaacaatctcagtcactatttgtggctcacaaattaattcaagaagtggaaacaagtggtaaccaaggcataacattacctttccagttatcaatgtatacatgttgagaacgtcatccacagtcgactcaaagtgagtagtagcatcataactctgtcaaaaagttttaaatgcggtattgtcaacctatcaacatatggcaaaaatattaataccaccgagtaaactcactgttgatataaagcagttgtccaaagtgggttcgttgaccggttcatatctgtcatagatatcaaaaaatatctcatcaacaggtcctagaaggtcaattccaggttttagttcaattgcggctgatctgtctctgcctcggttgatacaaatgcaataaattttccttttggagcaacattgtgagtatacgaacaacaaaataggtacctgaccagaacagaatagagcattcaatttaaagaggaatacacaatttacaattgattggacatcgcatgcacaaaatattagtaattttttcaagttttaaacatcaaatcatcttagaaattttagtataccttctgtattggggatgattacaaaattaacagtcctaaccagatcatgagtttatggtattgtttactatgtttaataagaagagtttaaaatcatacatttatattagtatagctgaaaaaggagaaaagaaaccaaaggacaacatgacgggagattgatattgatatgtaaaacataacacatacctaatggtcatttatactaataggtctaggtcaatttagtaattaataatatacaaatagtataaccctggcccaataggactgttaagatcatgagactccgaacatagaatccaaatattctaaaatccgtaagctaaagcttgttaagctttaaaataaattagaagcatacttgtatttttcacttgtcagcttgacagccagtgattttatctgtatcattaaatttttgaaatttcttattagaatttctaaataaatgaaatagaagcaaacttatttcatgctggaaccatttgataattcagatgagactgaacaatttagcttcagtcaagaaaccactgcccacgctaattaatggtcccagtagcacgatatatattgtatcggtattgcaaaattttctacaaatttaactatatagatatatatatatatttaatatgtgcatgtaaacttacatgtctgacttccgacccaactgtttctgtggtaaaataatttgcaccgaatgggaatcatcagtgctggggattgggtggctcatgatggctattgcccttgcaaccctaccaaccttcctcacctgttgaaatgattacaattttgttttaaagaaggacgcagttccatcaagagtcatttaagaattaatatcagttcaccttcgccaataatttttttatcaacagtagttaaacatccttcagaaacaaaactatttacatagcattactcctagatttagaaggaagcaattattcactttcaccatcatctgaactggttgcaaatatcaaactacaggttggtttctaataccttgccggcaaatatgatggatcacaaacaacttttttgcacttgcagttccccttcagatgtgacaccaacaacctttccttcctcatcaaatctacctggcattcaagcaaaaaattaaaaatccacaagagtgtatatcagcatacagttcaaacttcaaaacaaatcaaaatcacatggcaattatagtacaaaaatagggatggaaataaacacaagttcaataatttaagaaggtatatatattgggttaggtatactgacagtggtgtatatcaaattcacaatcaattatacaccaatgaataaatttttcaaagttagcttaattcatgcaattaatacatttttcaaagaaactaaaacatcaactacttgatgacaattgacagcatgattttattcaaattttcaaaaatacgacattcaagatctaaaaataattatagttcgaagactggattaataaaaaaatcctattgaagttgtaattatgcaagtgtgccaagtcttacactagtgtcaattgagagatataacagagaaatgtgtgtatgtatgtataatagagtatataccttgcactcaggcttattcaacatatatgttccaccgtaaacagcactaagccgtgcaaatgcctgaagaaaaaaaaaataattaacgaaccttgagcaaaacaaactccaacagtatattccagaaagagatgaagcagatgggtagacatgggagagtgagatacctggggaagctctcctaaaccatacaaaggatatatgtacggtgaccctccttgaaagcgtgcaagagactctgcatataactacaagtaggaaacatacatatgaatattaaatagggaaacacaataaagctaatgggaaccaaatggaacagaagaaattttcaattaagaagatccacgaatgagcatgaattacaagtgcatgataacccagtaaacttaccttcattctcttcacagtgtccagtgctggctcagccaagtagcgatcatcctatgaagcgccaaagcatgaccaatgaagtctatagtgttatcatcaaggccgtattttctgtcacacgtcaacaaaaaaagcaaaagaatcttaaaatactcctttttcttctcattagtcagtacagggatcaagagatatagggaaatgtatgatcatcatggatgcaaaataaatttgacgtgtaactacattatatatttacaacaaaaaatgccaaataagagtaaataatcaaatgctaagaatttgaactaataaatacatattgactccctatacaatataagaactacagaacagaccataaaccatacacttacattttactaccaactttacatgactgactcatgtagcagttcagcaaatccattatatataaaacacaaatataaataaatcaaaatttcatgacattattgataaggacagggaaaaggcaaggtaattactcctaaaccaatttctacatgtttatgcagactatgaaggcaacacaaagctgagcctgagatgttaaatctgcataaataatggacacggcaagaaaacaagtgcacacatacgctatcaactctttagtagtcactcttgtcaagtccatcccctcgtgggtcttgggatcactctcattgtagttttgcacataaatgaaaaacttgcgtgcacggcgtttttcaaatagccccataagtggggacttcaatgcctccatgtcgtttgcaggcaccttatgaacctgtaccaaccccacaagcaaaaaaaaaattaaaacatctaaaccaaaagaaacctcccattaagataacgagcaacactacacaaacatacctttcctttattaaacacatagctcccatccacagctttgaaatagagatacttggtaacatcggtatgatgagaacccgcaccaaattgccattagccataataaactagaagaaaacaaatcataaataataatgttgcacaaattgagaatcatatcatatgcatccagatttagtataccaaaatataataaataaaaaacaaataaataaattataagaccttagggttcatatcgatgttgtagtccctgctagcgcccaaatgtggaggaggcttgtcatctcccctgaatctcttccaaagctgaagaggaggacagagaaaatcatcatttcgcagttcaaacttcataataacatattcttaatctaatattattatttttgcagaaaatgaaaataataaagaaattattaaaaaaaaaaaaacctgaataagattgagcgaagtggactctcctccgtaatagtcttcctatccatatgcagaacctgaatcgaacaagaaatagctattagcatgcgaggattggatcgattgagaagaaaagaaaaacgaaagtgatgaatggaaatagtaccttgaggccatcgacggagagaagccgctgagaatgcactccttgagacccgtgcccaacacgatcacatcgtactcctcatccatgttcgatcgatctcgatctcgcccgaaaacggggtttagggtttccgaaatgagaaagaacagcgatggatagacagaacaacacaacacaaaagtgtgatttgattggtacgagagaagagacaagatgggaacaaccgcaggaacaagtaaagaaccggatctcgggccttgacctgcacagcactccacacttaaaaataaaagaataatagtaataattaatcgctgtgtaatgaaatgatatcgcgcgacactttcctcatccctgttactgttattatcaccgtgcccctcaattttgccatgataaatacagtatctattttagtgcctaagaagccgttccatacggggagaaatttttcatatagttgagaattatgattttagaaaatcatgaatcctcaaatatttatttataagagtttataacaaatcttaattttttcatcaaaaataaataaatcatgtgattttttttcatattcgatttaactttttgaacataataaattacaaagcaaaatataatacttagttataaaaaaaaaaaagcatagatgatatgtgcaccttgagaaataaaagatttctggttgagtctcaattttatgtaataattactttcatgcataaatttcaatagacgagataagtttcatataaatcaatatgatattcctcaataatcaaaatcttccaacacgtttcttagcatgtgtaattaagtttgtaaatctttagtatggaagcaaatccttatttgactagtgataataattatatttgtattaataatgaaaaagtataagacataatgagtgtcatacacaatgacatatacaaaaaagatatagtcaccatgagtcaaaatttatgtgtccataatatatagcaaataaaaaataataatgaaaagttacaaaagaagcatgaaaaaggagaagtcacttgtactaacaatattattaaaggttacgaaatgttatacataaatgtctatattgtcttaaaaacaaaaagaaaaaattataagtaataggaggaaaaaaaatcaaaaaaggcaaaagttttttttgaattgtttatgtatattttttattgaaaattatatcaaatcgatccaaatctatactatttttttatcaaaatctttatatttttaatattcattgacttttttaaattgtaaaaaatcttaattaaatattattgaatttattgtactttttaaaaattataataatcttaattgaatatcacaagacttatttattcatttgaatttttatttaataccttaaaactttttataattttttaaaaattattcaaatcctaatctaatatatccttatttttttaaacgaatatcaaatataaaaaattaagattctcaatattcctaataaactcaaaacgtctccctattaaatgtttcctaaaaaatgagatgtaatatgaaacataaaaaatttaaatttaattcttaaatatgaaaaaaatgtgatagactacaaacaatttaatgacaaattaatcctaaatttataattaatattaaattgatcatcgaaaatataatttattatcaaattatttttgaatattacaattaaattacataatcatctcacatatttaattatataaccaaattgtcaaacttttttaacatttaaaaattaatttaattttttatcttttatgattaatttattattgttttactttcgtgactaaaataggtatttattcattttcctaaatcaccgaatatattttattcttattttcttttctctccgtttttttccaagccaggcagaaagctagaaatacaataggaaacaaaattcacttttttaccatttaatactcgaaacattgattaggctagaagcctaaaacagtcaccatcaattaatctatgacttaatagctaattattataaatgtgaaaattaacatgtattagtttgaccgaaactgtatgtaaaaaaagaaaacagagtttgagcgaaagtgaatttatattcttaaatagaatcttaagttgaaatcttataaataaaataaatagaatgaaaaactcattgaatcagttagccaattttttaatataaattcgtgatttgtaaaactaataattaaatactcaaattaaacattttattttaaaaaatttatatgttccattcatattaacataacattgtcaatttttttatatagaaaatgatatgtgtgatagatttattaattttataatagttatttcaaaaatctcagttagtataactttttattgagatggtaactgtgatttatatattttgtgtaaacaaaattatccagaaaatatatgaaaacaaatatttcttcttcttttttcttgatccttctagtttattaacagtgttcgaattttatggaaatatacacccattcaacctctgtcactttcatggacaataaacaaatctacgacaatcctaattattttttgaattgaaaactctgtaaacgataattagtatccagtacctttcttttattttacctggtttgtatagttaagattacccaaaaattaaccaaaaatctaactagaagttttacaagtaaaagaacaagtgttggtttctttaaataataataataataataattattgttattattatgtgaacttcgttgttaagggttctaacaaagtaaatttgttcccttttttagtttagagtatcttaagttgcctttaaacaattaatggtatgttggagtgaggtgtcaaccagatggaatcatatcttacacaagctatcgatatttgtccaaacaaaagaaaatcaacttaagttatactattttggattgaagtttataatttttttttatgaatttcaatatacaaaagttgattctaatacatcaagtaaaaaaaaaaaaagaatattaccttcaagataaaaaaaaatatattttaaaaatctcccaattttaatctaaacatgcactgcacttatatgatcaatatcctaagggttacattttagaagtttaagttgaatatcaactttttattttgacccatatagaacatcaacccgataattgtcttgatcgaaatttgttagatggtttgaactttaaattttgtttaggtaatagtcatttgtattattaatatgtaaagttgataaatctattaattaaaatatgaaaatttaaattatagtcattaaaagtgaaaaaaatgtgataaatttatcaatttgttaacttctatactttactgttaataaaaaagtgtacatgacacatggagaaaaaatgtctcaaattattaccaacgtgactacggaataaataaaccaaaagttagtaagttttcatttgatcaatttgtcatactccaaatttcgtttcattcaacgataaaatataatttaatttcatctctccattttttttatcgttacaagtataatattacaataaacactaaaaaatagagaaacaaaaataaattagaacaacataataataagcataatattaattaataagtatagtatgtctgatgctttgaagtttttaatgagactcaaataaaaatgcaaaatcattaagttaatccttaaaaaatgagatccaacttttttttttgtcagtatctaatgttgtcacaatatttaacatgaacagtatatcaatcatggcaaatttttcaattacaaaagggggaaaataaaaattatattatattttacctttaaatgaaacgaaattgaagtatgataaattagtctaatggaaacttattgatattttggtctaatgaaaattactgcattttgatccaatggaaacttattgacattttgatccaatctattcagcaactatgttgataatcatttttgtgacattttcgttcttctatgtcactaggctttcattaatgataacttacgaaagtcaacatataaatgaatttgtcatacttttttactttgaaaattaaattttgaatttttatctttcgaagatgaatttgtcagcactttacatatctaagaacgaaaataactacttacttttagcttatttaacttaacttaatcatagctcattctagacttaaacctacaaaataggtgaaatataatgatttatttgaaatatattacggggaataaagtcataattatctaaaatatatttacaagtttcctaaagctagtcatatctaatgaaaaaaaaaatgttagtgtttccatggaaagaaagcaaatgagtccccttataattactccactttgacctaaaaaatgtcaagaaaagtgaatcttcgttgttttcgagcatgaataattgttgttgaatactttaacaagaactcacattaaaaaggaaaaagaaccaaaaaaaaaaaatgcttaagatactataaaaattccaatgctaaaaacgacagccaaatatatggttggcatgataataaaaatcaattctaataattaaaatacaacttgtatggccattcgtagtagtaaatcacaatcaagagatgtaaaattttatccaataaaatacatgaaaatgcatgtcatgtgagacatctccatgtagaataactaatacatatcgaagcaacgatcaagataacatgttcttatccaacaacccaaatcataatgcaatttttttgtaacctcgtataacgcataatacaattgtatcataacactttaccactaatcctgaggaacatgactgttagattgttacgagaggtttcaattactattacacaacaaatgaacctttattcacacgtagtgttttgtacaatgcatcctcaatgtctgtctcaatttatcctactttttccatcttataataaatgtcgtgtaaaaaaaagttttaaaataactattattttaattatttaatgtaatattaatcacttctttctattaatattttaataaatgtcattttagtttttcaatataatattaatatttacactcaaatttaatttatttacatatttttaattggtctaggtaattagttagttagtttttagttcagtaaaaagtgaatacattgaaaataataaaaattaagaaaaaaaaaccataacgatagatatggtaacaaattttgatggtttaaactttaaagtgttgtttctcataaaaagaaattgatttaagtaataattattgatttgagtaagcaaaaaatgaactgaaaaatagagaagttgatatcaattagaacatgcaaacaaaataataaaaagataaaaacacatcagttagaagaattgaatatggataataattaataaaaaacatgaaacttatggtgaagtttattttaatatatataagtttataattaattttggatttgcatatagttcatagccagaattccttattctattccactttttattggtgttttgtggttttagccccttccagttccacttccatcctacatagtaccaaagcatgatgaaaaagtaggaatatatgatagaaaatcttcccaaaagatgtataggaatcagttttattataaactttttcagtcttttgaataagcaatttgtcataattttgatttttataatctttaatctgaatttgtatgatcaaaataaattcaaaaaatattatatatatatatatatatatatagattttaatttgtccttccattaagtatatattttagtagattttaatttctatacactgtttgcaatattttttacattattaataattaaaattataataatataaattaaaaataattataataaaatttaactaacttatttatataaaattgtatgattacataatagtatgaaaatacattttatattacaattcatgcacttttattcatactttaatacaaaacttatgataaattacaagttatattcgaatacacgtttagacaacttccaacaattcaaaattacttaattcttaatttttttaataagagttatcgtcaaatttttattttttatttttataatgtaaaagaccagagacctatattaaaaatacaaaaaacagactttttattatttatttaaaagaaaaacagtgtcttcttccattaaaattaacccgcgatatcgtgttagtgaagagggagagaggatccaaatccaagtacggttgggttggagagaaaatgcgtccctgctgaaaacaccaaaccctaaaacgcgaaaaggttctaaaatttgcgaaggaaagagctagcggagatggagattcactacagtaacagctatttcgagaggcgccccatcctcaagtccaaggctcccgctgttaaatgggtcaaagaatggtattcccaatttcttcacgctctcatatttgcatcttatgttttagggatttcaatatcgtggaaaattgtcttgtttgtaacgaggctcaatttatagtcatagttccattattttgttatgtttcaattactcatataagagtaataatacgaaaatattgtttacaaataattagaattcatgaacatgtttttattaaaaattaaagcagtacacatatatattggagttaaaatttttcctcgtgaatttgtaccattcaaacagagatttgctgttaattaataaattaaataactaaaaaagttaaggaataaaagacaaatcaatcagtaattcgcgtgcattagttttctttgttaagtgttagtttgttagtttttttgtcaggagcgatcaaatctgtgaccttttcctccttcccttctttcttaaccacccaaccaaccttatatctactctgttattgttaattactgtgcttatcgaattagctttgagaatctggttggtttttatgtttagatggaggagtatggaggggaaggagggggagagtcactttttcatttatactaaagctttcttagtaattgagttttttttttttaatgagtggaatgaaattgtaatcagggattatcatgggaccttgctaccattcttattatttttataaacgttttacaattttctcgatttaggaatgtgaatgaatggatataatgtgtttaaggttagtctttccatgttgctgttagatggagagatcaggttataatgttttagctggccatgtgcagtttccattcttttcatatttcattggttaagtgttatgctaatcatcagatgctgccagggttccccaagatcttgtgacgacgggagggaagtgcatgatcttaaaatgggtaacaggttggtcttttttactacccagcaagcttacatctttgctcattcctgccccatttggccattctttgtctgtttacatctgtgtattttattttatttttttaaaaattgattaatgctactgtttgttttagcttctataatgatacaaaacttggtagaaaataaggggaaacaagatttgagacagaatttaacatggtgtaacctaatgactaatatgcattgttgacatgagataatcagttgtttggctgttttttgctgaatttgggtgagaggtggtaacagtttgtacgtctggagagatagaagttatagtatcttttttaatacttaatactaattcaataaacaaattgttgtaaacatgcaaaaaattgatgtttaggtgctttgctaagagaccactgtatcatatgatgatgttattatatcatgttttgtatcttacatttctctttgttttactttcctaagaggataccttgaagaccttgaaagaaaaggtgaaagagccttcagtgccagagccagaacctgagccaactactgaagtactttttctttgcagctatgatggctgtggaaagacattcatagatgctggtgcattgaggaaacattctcacatccatggagagaggcagtatgtttgtcactacgatggatgtggaaaggtagtggttttaatacttacagatgcacaccatacacatgtattttatatatattatatactatatatttgccattgtattgccaagttgtgaaacaatagttttcattactgcatgctgcaaaagcagatcaaattacactttgttttaccagtctcttatccagtgattagcctaatagcctatagctttaatgaaacattgtgttgatccctctcaagcataaactctgtttttctttcatgccatgaaatagattttgcatgtgtttgcttttggattgaagattacatgtctatcatggggggcagggttaggtaaagtgatctaagaactgcatttatttgcagacttcaggtattggcatgttatgctgcatgattggagcataattaattaaaacaaatcattaaacctttttaattggtttatatttttttaattacactttatttatttatttaatgctatgtatcaagttgcaatagcttgctgtggactgtggtttactcaatagcaggtctatttagcagtgctgaaagtatttgtttacattgcagaaatttctggatagctcaaagttgaaaagacattttctcattcatacaggggagagggattttgtgtgtcctcatgaaggctgtggtaaggtgatgatttgatccaattaagggtttgttgttttctatgacggcttcctttccctagttggtgttgcatgttctgtgtgttgttctttatggtttacacatttggatttgtgacatagtcaaattagctgatgctttccatctatttcttcctatcacaaagaccaacatgaattcagtcttcaactgtccactctgaatctgttttggttggaatgtttttctcaatggaaatttggaattaccagagatattcaagcagcaaagcttgagttcttaattgtgagacctatgtgtacatagtctttaaattgttgatatagagggtaaccaatgaagttgtaaattttcaatttgaatcaatatagaccaaatgttttttatagttgagtatattgtgattttcataaatctgtcatgaactctctctctatacacacacacacacacacttttgatggataaattactttatgtatgatatcatcttcaattattatccactatttggtaagttattattagtcttttctttggagtttggataatgtctttatgagtgtatgtttgtaatcacatctgctgcaggccttctccctggatttcaacttaaggtctcacatgaaaacacattcccaagagaactatcatatctgcccatatccagattgtggaaagagatatgctcatgaatacaagctaaagaatcacattgcatctcatcatgaaaaggttggtaatgtttcctatttgtgtagctggtacattttccttatttttttaccactcagtgtattaatattatatgatgcatgttattatgtaaagcatacctgttgttttagtccatccatttggtgtttgtgcggtagtttcatttggtttgttagtatatctcaatacaaatatgtattatttctctcatgtatgtcgtgaatatctgtataaagatgtctctaattcaaactgatgaattactccagtggatgtgactccagaaactgtaaacatttcttgaacagtcttttgatttgcaatttcaaccttatcttacagaatgcatccgtggatgtgacaaagtacactactccaccttcagagaagcaaacaaaaacttctaaaccatctggaggggcatatggttctgcatcatctgaccgtccctatgcatgtccctatgatgggtgcgaaaaggcatacatccatgaatacaagcttagactccatttgaagagggagcacccggggcttatggctgatgaaaatgcagagcatgctcaggctaatgttgacaatgaaatggatgaagcaagtgaccatgatgcctatgttgcgaaacgatcaaatggtaaaattcagaagcagagtaagcctaaaccaaacctcaagttgcctccttccaaaattgcaaaacgcaaagtgtccactcccactttaactgtaaataaaaattcttggccgtgaaagatgaaccttttgatgaagaagatagcgaagaaacagaagaggatcgtgacaatgttgaagatggttggagatatgcaggaggaaacaatgaagatgatgatgaggaaacagaatatgaagactgaattagttatggcatcctctacggaacttaccttttccaagaaatatattttctcttcaacaaaaaaatttcagttgtctcttttttatttggctgaggaaatgacatcttgtcaactttgtgttggttgttacagccttaggaagaatttatataaataaaatgcgatgtaaaatgctcttggttcaattgtcatccgttgtcaccacaagattctgactgaattttgttgactttggataaaccttggtaggtggtctattcatcctgtcacagctatatacttcaaatattttatcattagtttgtttttaaatgtttaaaaggtcacaacatcaatcttttaatagattttaactttaaattagttaagtaaaattgtcattcattcttatttaagaccaaaagagcgatacaaatggataaattttaagatgtactgagcatgccgttcacgattctccttgccgaccatggcaccaagctccatcaccctttcgagcttagggtctgagtagttgtgtatccctagcaatgatcttaattttagactgaccattcaaggtaaagagaatacttaaatgtttttagactaattcaatgtttaatggtggaattgatattaataaaattgtaataatataatctcagattttaataggtcacacaccttgtgccaagtatgagttttaatgaaattagtgttgcttataggaaatcatatttttaatattaaaagtatacatagaagtctaaattataatatttacttttaagttttaataatatacaacaatattcattaataatgggttcatatttaaaataataagaaaataacataatttaagttgattttttatttgtgtaagaaaaaactaaaacaatattatattaaatgtttttcaaggacaattgaattgttggttttttctaggttagttttttggtataggattaatttcatttttttttctttttttcttttataattatcgaagtaatttatgtaaaaaataatgataatcttttcaaaaataatgaaaatgtataaaatgaatattattcttttattttatgatttcgtacattttgttctttaacttttatttttaagtttgaagtaaggcaaaatgtataatttaacttttagaaatcgataaacacattaaaggtgagatttaaatctttacgcattctttacttgacaccaccaaaatcgtgaagttcgttaagttatttgtatttttgatttattactacatttgttaattgaagttttaatcgactattgtgcaaatttaattttgatttaggataaataattattattttaattttaaagtaaaaataatataaatattataatattaaaataaataatgtagtataagtgatgtcacagcaaagaaacaaacagatgaaaagaaagagaaaaagttagtactatatgtttatatctattagtatatgacaaaatattaagagttaaaattataaatttatttattaaatgttttttattttattataaaaatttaagatttttttgttgatatatttacataactgtcgcattaacagtaacatttaataaataagaagatgtattatccaacaatggtaatcacatatactctacgggtttatttctctcctatgagattcttcattcaataaatgagagaatattcttgagtcctaccacagatcataataatgtaaataagatctcaaaacagatttttacccaaatctacggagcaagtttagtttggtgttgtgttgcactgttactgttgttttaaggtaggaagaaagaaagagcgggtgaggagtgaggaggaggaaacatggctacggcgtcggcgtcggcgtcgtgggaggaactgacgctgaaagtgaaatggagcggcaacgagtacaccgtccgcgtctgctgcgacgacaccgtggcgagctcaaacgtcgaatctgcgagctaaccaacgtcttaccccttcgccagaagctcttgtaccctaaaatcggttccaaactcaacgacgactctctcttcctctcccagcttcccctcaactcctctctcaagatgaccatgatcgggtacgccactacgctgtcgtttcgtttcacacacttttatttttagggttttctttcattacattgctcacgaataatgaatgaatgatttggcagtactacggaagaggacttgctcgtggatcccgttgagtcccctgagatcctgacgatttggagcttcccaaagatgaggctgttgacatcaaagatatggaagtcaacaagctgaaattgaatagacgcattcatcaattcaaggttcaagttgttctttttccgcattttcattttgtttctttctattgtaactaacaatacctatctacataatatcctacagattgagcttcaaaatccgtgtcgccaagggaagaaactgcttgttctggatattgattacactctcttcgatcaccgctccactgctgagaaccctcttcaactcatgagaccctgtaatttcatttccccctttcgttttcttcttttttcactcagtggatggagtttgcttaaaattacaaaaatgccatttttaatcactcaagttatcgaaccttggcaactttagtccttagttttgtaattttagaggctaaaaggttgttggtttggtaattttagtgattaaaatgacattcttcgaattttaggaactaaattgatcaatgcagatgatttcagggactaatttgattaatctatttttttactattattattgaacttaattgaaaggcattgatattataaatgtctttttacactgtcattcaatcacatgttgttatgtatggtaaatttgtttgccttttctaaaagttatctcaagaatgatttctaattggttgatagtacaagatttttcacactgacagttaaacttggtattgtttctttcctctctcttgtctgtaacagaccttcacgagtttcttactactgtttattcggagtatgacattatgatatggtctgcaaccaggtactgtcatcttactttatctgtattctgttctgtcaattttttattcttttgggacgataatttgtaatggaatcaatgctacattcacttcctgcagcatgaagtggattaaagtcaagatggaacaacttggggtgttggacaatcctaactacaaaatcaccgcacttcttgaccacatggcaatgatcacggttcagacttcttctcgtggggtctttgattgcaagcctcttggtttgatctgggctaagttccctgaggtataattatgaatattatgcaataaactaacatgccatttattttcttaatgaaagttaacggaattatgttggcatatttgctcaatcatacattaccatctacagcccaatgaatagtatacttcttatatggggagaaacgggacacccagaaaatactattgctgtaacttagtcttcctgaaaaactaaaaagatgttgatgcttgtgagtatagtcataagtgagataaacctaggtgggttatggagttattgattctagttaaataaaattgcaaaatgaaactatttgacattctaaattgctgtaatctatacctggttttcatttatttctgtattgttttcaattttttgcatcagttaaccatgcccttgatctagttgtcttgatgttggtttcttattctatttcagttctacaatgcttcaaatactatcatgtttgatgaccttagaagaaattttgtgatgaacccacagaatggtttgacaattaaaccattcaggaaggctcatgccaaccgagatagtgatcaggagcttgtgaaacttacccagtacttactagccattgcagagcttgatgacttgagcaaccttgatcataataattgggagttattcacagaggacaatgctaaaagacgtaggcacagataaatgataattgaatgcaataactgaatctggtaagcaagatgcaacttctagacttgtaaaagtttgcagttttataagagacattgttcagccagaggatttcagttttttatatcaagtatttatgtttggacggggtgaatgacagaaaggaaaggatttcttgtagcagcttttggagtatctaagatgattaatattgcttatgcaatttctatctagcaattcctgaacagaatttgatttgatgcatgaaaattttatcctttcataatttgttgggaaagggtataaagcatggataaattgcaaaatgatgattagttgtgtggcacctatggctgcaactattctccaaagtgatcaattgattctaattatagacaatgtattacatggaagttcaatcttctcctcgtgtttttcggcctatcatgtaattaacttatcattgttcttggattttatgcttcatgatctatattgtctttttttagtgatcatcttctaagtgggtaattattgtgtgaataactccatttggattaagtggggaaataagagagaaaatgatagggagaacataggtgaggtccaatttggttcgtcttaaagtgactgaagaaaaaagtgtatggttctgcttctgttcgttttaataactcaatgatttgttatggattctctaagcaaaagtatcggattagttaaaaaaaaataaaaattgttaagtcagatattgaattagaaatgtttggtaaaattagtctttgaattagttgattaattaaatataaagtgacataaaataagacgttatatatttttataaaacttactttttgtaaataaaatgtatgtttcagctaattatagttttatgtttcacttaatattgaacgtagtgatttttgtttgaagtatttattaaaaattaaaatgaatagtataataattaaaataaacactaaccatcaaccaactcacctattttacatattgatttttaaattctgattggaggtttaactcgacaccaccggtttagttcttgactacgtccttcacactttgcctttaattcgacactacccgcaagtaaaacggtgttcaatatataaacgtgaacatgaaccacaaacatgttgcccaaatagtgtgggctttattgtgggttggattcacaccgtgggcaacacgttaatataacaacatattagctcatcaaatgaaaagttaagttgctttgacttggaggaccttctaagatgcgatttaatataacaacatattagaacatcaaatgaaagttaagttgtttgacttgtaggacctacaaaatttaaaagcaataaataacctttaactagacttataagtgaaagagaacttgtagaaatcaatgacttaataatatcctaaatcaattttctcatgctaccaaacatgttgagaaaacataacttcattaaaatcacattacaaacattagcttaacattatccatacaaataagacacattcaaatggcccgagatatttgctatttgcactggaccaaattccacaatagtggagattaacaagagggggtatacagctacatattcactgaagaaacagtggggtgaaagcttgaaaatgttggttaccacctctggtaggtcaactgacagaaatagaataagatttcggtaatgaccaccaggtgcacattaaatggtaataataagtaaatagaaaacggaaagactaagagaaggctgaaatcagcaaagctggcaggcagagagagggcatatgatggaaatctctgcacaatcccatgcatgggaagggaaggaagcaattctatcgtgggtgtggcaacaccggttgaatgtagaagcagaacaaggctacagctactgcaaatctaaattctgagagcagggtcttgccctgaattggtgtccttgtgttttagagaaaggtttgcgaactgagattcgaggtctctactgtttgtgcgtctgtgacttccagatggttgctgttgtggctgtgtctgtggttgctgctgctgctgatacaatgcacgtaatcttccaatctctctttcagtacttcctgctccactgaatttcacattgcatagattttagtgtacaaaacatgttcctgtgatttctaatgaaaccaatcatgcttaaaaaaagaactcatgggcctaaagagaactcaggcaaggatttcagttcatgttttctcggagtaatattttcttggtctcctgcatggtgtccccccacctttttgggagccagacaaatccccactcactcatctgaatatttagtagcacggctcaggccacgtgtttccaggggaatatgaatcctgcaatgcaggaaaagtctgctacccacatgccacacggtattaggtggccaactgagccccacctcatttcttgaactcaaatgttaattcctaatttccatcactatcctatattgctagattcttctaatatagaaaggtacacaagaatggatttttccccatggttttgaagtccttgagctacagttttgaatttttcccaaattacttgaatacaacccttaaaagatcaaacctgcctttcttaatctcattacagtaattctcttgcaaccatgctctagcacatagaaaatagaacctgaactttctacttccttgccacttatatgatataatcaaacttagattaaccttatgtgttccttttctattaatttatactatataatatatcataaatcacaaggaattcactagctgaggtatctaaagcatatatacgcaatccaagttaaaaaaaacttgtgttacttgaaaatggccaaacttatatcatagaaacttacaatatttgataagctgctcttgtgctatattttctaaacgttgcttgagtgctttattctccatactcagaataagattctgctggttaagaaactcgagctcagccgagacttcagacccttctgcctatgttgacatagaaagaaatagaatcagcacttacataaaatgtcactctgcaaacatgcacgatattgccttgtgcagaaacctacctgtaaagcttgtacattcctttccagctcagctatgtattgaagtttccggacccgtgaacgttgagcaaattgcctgcattacaagtgtttcagaatttttttcctttccatatatgaattgattggttccaaaaaaaaaaaacttctgtaaattaaatagaaaacaaaaagagaaaaacacaccacattcatcatataataagaagcatggtttaactgctttctctacatgacaattagtataccagcaatagtgatgcagacatcactttgtaccacaaacaattgttatataacttatatcttttcccttctacgtatattattaagatgccatatggccacaggtagtatagtctagatttgatattataataatgtccagcctatttggtaaggcttaaaagggtcaataatggggatgacatgacttaatgggtttgccacaagaaaccattcagaacttgatcccccaagttagatattagtggcataaaatcaagcaatcactgtaataaccataaaatcaagcagagaaaataactacgtactgtttagcacgttttgtatcagtttcagaggcagatgactttgcatgtgaactgtcctttttttcaggaaatgattttgcatcctgtaagcctgattctactaaatcgtgcttttcacttgctgctggtggaagaccatctgcatcatgtggtgtacattgcaatcctgaactctgaaagcagcactgtctttgcctgagggaacaccaactggatttgtcatggcatttgaaaaagagtcccatgacctatttttctgttttacggagttcatttctgcataaacaggtacatgacgaacatctttgctgcggtcaaagtcttgagatgaccaagacggaatagacatcatattcttatatttatactcgtcctgattagcataattaatgttagatgcattaacagtgtctatgtacgcaaaagaatcacttgatgaacgccgatggccacctcttcggacaggtgtctctggctcgttaaggagatcatcaagccatgaaggctgctcctctataacaagctctcagatgaagtacgttggtggtgtgtgtttccatctctaggtctgttaccatcctttaaaccaacaggggatttgggacataatcagcatatgcttgggaaacactaggaagcggacttttaggaggaagtagaggatgctttccaggatacataaaatttctgaaacctgatgagccctttgaatttgccatagaagcagaatgaacaatacctgtcgaatttaaaattaccaaagaatgtgatcatgtgaataaatcaaaagataaagacaacatagaaaattttatatttaaacaaaaatccatgattcaacaataaagatctgatatgcatgtgttctcgattataaaatataaaccacaaatcagtaaaaagatcctataatgcgaatagcatagtatccttgaaaatgttccaaaaattgaaatttggtttatatgcaaatttactcacagcaccaaaagagtaaatgcgctagtatcagagaatccacatgtaatgtaaccaaggcagtttgggagagaaaaaaaagcatctcagtaatctcaataaccataaatgataaatctgcatacttcatcgagaaaaaagcctaagaactaaatatctcagatctccatgatactatatatttcattggataaaagttcacaacatattggcagctttacggatttatctctttcttttattagtccaaaatacaattctaaaaattgtccacccatctcacaaaaatctcaaattttcattttacatatacattattatcatttcagatagttgatcaacattgtcaatcctttcctcacggtacaggagcatcacatcagattgtccattacaatttcatcataagcaatgcacaactcgtatgaaatagtaccaagcacaatagcaatcccatcacacataaatgacataatattaaccaatgttttaagtaaaaccagcccataatgataaaaaaattaccagcttaattttcttcaataaaaaatcaaacccaaacacatgcatctaacaagcctggcatcgcaacagtaaactaccaatgtaacagaatactcaataacatcatttttttttaaaaaaaaggagaaacaaaacttcaaaattggaagccacaagaaactagctaggggaaagaaaatccaatccacaaagaaaaatttaaccacaataagttaaaaaataagaaaaataaaacgtagcacccaattgccaaactttctattttatactttcattttctcaggaccagatgaggggaaaaaaaacaaagatagaaacttcacttttctacctttcccaaagaatctgcccaaaacacgcactcagaaaacaagaggagaaaaggatcaacacagaatttgaaaacattgaaaacccgacacggtgcaatgtgcgacactgtggcatcaacagcgcaatgatttcaagctgatcgaacgaattgggaatgaaaattgaaacagattcgtttttcgcaagcaaacaaaaaattaagacaacaccaaaaggaaagaaagaagaagaaaaaaaaaacctttgcagattgaagattcgagatcccgaaatgcaatggtaaaggagcttgaaatcaaagcaaagactctctctctctctctctctctctctcttagggttcgtttcttcaacacctctctctctttctcttctctctgtcttcttgttgaagctgggaaatggggcttaattgtaaaaccatgataagtaaatactgttcctaaaacttttctatttaacgtttcaccctttaagtttcgttattccaaaaaaaacaaccttgggttagcaacttaaaaataatactcgttgttgtatctctgtccaacttgtctagagacatggcaaaatagaaccataaattcgttattatataaaaaaaatccataacatggaaagattccagtaatagattttggacattggactgaaaataaattcacttttccttagttgactcacactgggtcacccttgataccaaaattttaataatgttaatgattatgattagaactattgatttttaaaagctcatccaatatctaaatggcatatataaatgttgtttattaggaaaatgacacaagattttaatataacgttatcatataaaaatttataaaaatattaattatacatttttaacacactcttttgaatatattttattattacatgaaatttattaaaaataataattttatgatcacacatcttatttaattaattctctttcttaattaattatgttattttctataaacttaaatcaataatataatatgtgttaaaaatagtttattgctataattcttaaaataaattaagacttttatagccatgtagacgggtcgatgtaaaattcaaaatttatgatgttaaaaataattattataaaatttttaaaattattatatatgtttattgtgaataaatgaaaatataaaatatggttataatgttaatgtatattttttttatcgttttaaaatttagcagggaatactattttttttaaatatatttataaatttttaaatgattattatatttcaaatataatatcatgtggtaaggttttttagcattttgaattcactgtgaaatcaaaatggtgaactatattttaaaatgaaaataattattaagttcagatattaaataaaaaactttttgatatgtgagaataattattgtatgtcattacgaaagtttatatagtatatttatatgagttaacggaaaaattaacaatttattgtattttttacaaattcaaaaaaaaatttaattttttatctttaaaatctaattgccataactaacaaaatcaaatacgtaaaaataagtatttatcccatattataacattttccgaaaataaaaaggtatattcttttgttcgaatcaggtaggtgtgccgtatgcgcatgccaaaagtttcgatacaagtgtcatggctcaaatgtcttatttcttactattttaatagaaaaaaatgtatttttttagattaatttagttctaaattttcatcgcataaatgttgaggtgagacctgacatcctatttgaatgaaaatgtacatttaaactttttagctagaattttttcaattaatggctatgacagattcggtttaatttagaagaaaaaaaatcaaaacaaaaaatggaacaaagtaagtatggaaaaaattgatcgtatatacttattttatttttaacaatcatctaataaaaagtagaaatattttttgcaaagtaaatatagtagttgaagcaaaaagaattatcgtaggaaaaataatttcacctctaaattaattttaaattttgtttaagtcttactattatattattttatttcgtctcataattgtttaaaactcattgtttgattgctatgcatgcagcaagtgttatgttccatccattctagtttgtttttatcctttctaattgataaaaaataacattaataagtactcttaagatattaattaaaaattattattattttattaaaatacgtaaatatgttatatataattcttttacattttattataatttccgaattaaatatttttttcattaatcaatactctaagtacattaaaaaaaaaaaaaacctattttagttcatctctattactagttactagtaattaaaaaatgatatacttaaatcaatataactttttttcactaagatcattccagtttattaaattaatataatttggaaacttgcttttaagataaaaaaattaaatataaatagtttattccaaacataatttcaattacaatagattttataaaatgtatagttcaaaaataagtttaccaaaatttaacttaaaataaattttgatatttttagtaattatttaatataaatcaaatctatttataacacagataattaatatgaagtttaaaaaatatattttgtagcctgattagtttttagtttgagttttgaagtttttagaattaacaagtagttttttagctttagtttcaaaaaaatcttaaatcagtttttaaaatattattaattttaaaataaactcatttcaaaagtttcataaatattaaaattatttttaaaacattttgtatagtggttatgataatagtaatatcagcaacaactctgataatatagatacaatggtgattacgatgaaataacaatgacaatattatagatacaatggtgataacgatgaaaataacaataacatagtggtggtagtggtggtaatgttgatagtgacgccaaggataaaggtgatattagtagtaatggtggtgaagacaatgataataatgttggtggtgtcaatggtgatggttgtgacattgacaatgatgggatgattgtgatgataatgatagatgtgatattattggtagtggtgacaatgataataatattgatgataccaccgacaatgataataatactgacaaactaaaattcaaactcaaatattttttttattttgaaaatgaatgtataaatatttcaacaaaaataatctaaaaatcatttcagttatatgtccagcaaacacatttttttaaattacatttaaaaattaaaagccaaaaacttgtaaccaccacaaaactaacccataaaatattatgactacagagtatatgtattaacaatctaaagactctttatactataattcatattttacgttattatttattgtaaatttaaggttaaatatattttttgtttctttgtaatttttttttcgttttagtccttacataatatgttttttgttgtccttaaattattttaaataacatttttttagtgttcaatacatttttcttgctgttcaaaatgctaaaaaaaactaaattacaaagataaaaaatatatttaaaccataaatttattattttttacaataattacctttaaaattataactaccatgatttataattaaattaaaatattttttatgctgaaataaatattaaactcaattatttaacaagaaaattttgatccaactaatcgtaattgattttgatccaactaatcgtaattgatgaccaataatatagtggctgtctcgagacttcacattaaccgtgtccatctaatgtcatgacaaggaatataaacgtcacattaattacaaaataaatgttatttacaatttcttgacactttttcaaatattttttattggttgaaatttaataaaatttatcaattttttgaatcttgtttatcatttaaaagattatcttttatgatttaaatatgagatctacaaaaatttatagtttttttaaaaaatcagccaatcacacaataactatttgactcatgcataatttataaacatatttttaatctttataaaaatattaccgtattttgcttttagccacagatttggtttcacaaccaggttccaaacagatttagcataaacataatctcttagagatgagcattttaatctttattttgctggacttaggattgcatgtttttaattcagttccaggctccagcttttatattcagcaacagattttagctgatgtagtctcggttcttttgttgggcttttagttctttgggctcttagcccctttcatccaactaaaaaagaacaataaggataaaagtcgaagaaaacaaaatacaagcttctaaggttgttgaaataacttataaattaataaaaacaagttgacttattaagtctaagctagtcaaataaattataagttagtttatgtttatttgacatgtcagacatacttataatgtttttttttcatgccttaagcattttttttctttataatatacttatgtttttattttagttcttttaattttttttatattccatttaacttaattaatgtcttttgtttgcattagtccttatcattactcaattattatcaactgctgaggtgcagaaggccacttcatgacttccacacattaggacgtaataaagtgttattacttagtttcttttagtctctctaaatatgttttattttattttaatctttgtctctttaactctttccttcctcattttaatttctctaaattattattattattattattattattattattatacaaagataaaatcattaacttggtaaaaaaagtaatacatggaagcaaaatcaatacaataatttatttaattatatatgatagaatatatgaacgacatacaattgttaaacataaccaccaaagcaattaaacaattaagtgaataaaaaatcctcattctgaaaggttctttattaaaccattttagttatcaatttaaacattttcataatacaagtattcattatgaggtcccaattttgctatcccaatacacaacgtatactctaaaaacacacacatacagctcatttttttcttctttttgacagaacacacaacacgcttaatagcatggattttggaatctataatattaaatttaagacttcataaacaagtttggatgactaatgtcaaaatcagacacatatatagagatatataaattatatatttaaaataaactataatgaatttgtaaattataaatctaaaagaatataggacatcaaattggaaaataacaatgtccaattttaaaaccctaatctatccaaatcaacttaggtcaaacaaattaacagccaggtatcatgctcaccataatgttttatatatatatattattatatatattatatatattatatatcttttcattatcgatttatttttttaattttatttgtcgtctattgcaaaatttaagaagcattcatagtatagaatacaattcatttttttataccaaatataagttaaatatatatttatgtaaaatatatattagagattattgtaatgtttgtaaaaatctaatgcatactagaagtattgaaatttgagagacacacaaatacaacgactattctaccaaaagtaaaaaaaaaaaaaaaaaaaaaaaaaaacctcattagaattgagaagatccaattttcttgatagttgtcgatttgtctgcttacaaagatgtggttgactattcatataaatcaagcccccacaatgccattttttcttatgcaatttcatccgtcatgctcatatcaactgaataagccgaaatacacacggggacccataacaaaatggccaacacacacacgcatgcacgcgacaccataaagttggtaaattaaaaatgatggtgtgaatagtatcagctataaaacacatgatgctaaaagcaatgttggaacatcctatacatcaactattacaattatcgtaagaaattgagatagctgcttcataagccacttctccggtgaaacgtttgtgtctgttattcagatcactcgcggctgagattcaaattgccaattgtcacaacagccttgccttatgatcccagcaacttcttccatcttgcatatgctaaaataagcaagaaaagcaatacgcaagctgcagacgtgatccaaacgaagggccaaaataatccatcaatgtgatataaattacaaggaatgttcataccaaatgtaccagcaatcaaagtttcaatagcaatagcaaatgatgcaatagtcaacgtcaactgcagctgaataagttcatttcggtggttatcaagttggatgttgacatagtcttcagtgtcatcaatatactccctaacctgcaaatcagtcaaattctcacaatatttggcattccagaaacaataaccaaaatcagctgacatttcaacagcacaaatgctccctaaagcccaaatcttggtccatgaaacacagactaacttcctccccctcaacattaacaatatagacttcctaccattttgttataaacaagaaatgaaaatcaacagtaggttacaaccgtttgtttttaaatcaacagggcaggcaataatatattttgtaaatccagaattgcaacaaacttggacaaatctaccattaccattatcctatagggtgagcttaaattaatttattggagcttgggaattcttaaggataagctcccaatagtgtcacattgaaactagcaaacaattgagattccctccaccctcaagacaagagaaaagtaaaataatgcaatattatatctctggtaagtatcacaagtcacaactaagtttatgtggttgagtcacgtatgcaaatgaaacatatgaaatttatcatctaaaagcacaagtgtgtgatataaataagatagatgatagaatccaagtagaaaacgacagtttcatccttcaaaatttgacagactcatgatttgaccagaatatggttgttagaatacttacagataatattttgttacggttccatccaactgcatgaaatatgcatcaagcaacatctccaagtcctccacattgttataatcctcataatggctggtcacaagactttcacttctgttagaaccaagtcggcgaacaaacgtgaggtattaggaaagttatttgaggttgtggcacccaaatgagcctcctcaaattgttgattctgcaaccacttcctcgtcaaatatagttgtgccatatcttcgttgtcatctaacagatgttcaatttcatctcgcacctgtgaaagagggtcatacacttcttaagtatgatatctcaaagatgaggaatgcatcttcacatacaaggtaaaaccgcctgcaataaattttctatatataaaagagtgaacaaaaacctcaacttaagagcataataaatgattattgaacaatgtaacaaaagaaattaaacaattaaagagtttggcaagaaatagcctttcattctttattcaaagactgcagaaatggatgcagattgcagtccaattacatgttatttctctgaaaaatcctcaatcatcacaatgcacaataactaaaagaatctgttggcacttttattagcttgcacatttcatgggcttttaactggtggcttgaccagtccaacaaactatattaattaaacaaattggacttggtacatctattttcccaaaggttaatcctattctcaatttccaatttccaagtcatctataagtaatgaaataactatccacatcaacttagttatagcaacaatcagaggaagaaccacatggtacttatgcaaaaacataccttctgcactcgtgccagcaaccggtaagattactcttcaaactcctcacatgttcaagattcttggtgctaacattccgagccaattcatccaacacagggtaagcacctcgctcaaggtccgccacattcgagtccagataagtacacacagcctccaaagcaatctccagaacttgaaactcaaacggaagctctgactgcaaaccatcagcgcctctggcgtaggcaaccattgcctgccattagagacctgcatttcgccttcctgttcctccatgcgccgagaagtttaggttgacttttgcaggaagctgttgcctgagttgctcaacaaagggaagaacctcctgccgaagaggatcaagcaataacacttcttcagcagtcacgatcgcctttataaactccaaattaaccaccattgctttctctctagctgcaattttttatataaaaagacaattataattctattcttcattcttcattaaatcataataccatccaagaaaagaaaagaaaacacagaaccacagtcaagttaccaaaacaaacacaatttaagacatgtgattcaattcattagagaaacctaattttgagaacacgatgaaaatgaaaaaggaaaattgttgaagattgaaatactgttattattcagttacctattattttgtgagttgttattctgtttagattagaggaaagttgttattctgttacaaattattctgtttaggttgttattaatacttgttaaatacaccttttaagaggtagcagatatgaaggaaatgatgaatagttctctggattgagttttaatatggtatcagaagaaatttaatccaaagaactcaaatcccattttttttttttaatctgattcctttttttagccaacctgtaacttcttttccctctttgcacagtctccaatccctaatttccctaatttctccaccatggaaaaccctgatctcctgtccatcccacctccctaccaacttcttccctgttccacagtccaacatcatcatacagcaagacaactcttcctttcctgtcaccgtcatccttgatgatcaaactaccccctttggtctcaattaatggacaagcacataggtgcccgtaacaagtctgggtacctcactggtgcgatggccaaacctccgaccaatgatcctaattatgctacctggtcactgaaaacaaacgagtgaaaagctgactcatcgaatccatgagcccctctctcatgcagtggttcatccgccttgaatctgcaagcgaaatctgggatgcgctctccaacgttctacgacggatctgatgaaacttgtctgtttgaactcaaccaacactccttctccaccaaacagaatggttgtcctctctccacctattataatggcttctctccatctttcaggagattgatcaccgcatggcttcttttgcaaccaccgtcgatggcgtagccagacgcactcttccatggtcggctgcgtgtctacatttttctgagtggtttagactcagattttgaccaggtacgtggcgaaatccttcgtagagattacaaattggatcttgagagcaaatatgcatttgtccgtgcaacatcagcacccatcacaatgggacgccctgcttctacaacggattctctattttttatctcatactcctgtgcttcctctgcttctacaatggatattcttactcaaacataaaatgaagtcttctctgtttttcaaaatttcataatatggtccaaacccaatttcaaagttcaatccaaatccttcaatcagataatggacttgaatataattttttttttttttctgaattctggactctaaaggtatcaaacatcagacttcatgaacacacctagcaaaatgggttagctgagaggaaaaacaggcacttgtagaagtaacgaggcatctttatttgacatgaatgtgccttccaattactgggggagcagtcctttcagcagcttatttaataaatcgtactccctctagttctctaaattttcttactccacagcaaaaacttgaaactttcttttctatccctcatgtaatgaatcttgaacctagagtctttggttgtactgcctatgtccatgttcccaaaactctacgaaacaagcttgatccttgtgctaagaaatgcatctttgtcggatactctgaccttcaaaagggatatcgttgttttgatcctacaacccaaaaaatgcatgttgcccttgaagtatcctttagggaaactgaagtttttattcaaggggagtttcttcttctcagggggagatccagaacaatagagaagacgaattctggctatctacttctacagttcctactccaataccttccaccacaaatgatcagctcacaaacactaattctcctcaaaactcttcacctgaagtaacctgtgaacctccagaagcagatctcaacgatgcaagtcatcctttatcccatgagacaccatgcctaactgaatcacctattgtacataattctgaaatacattctgaacccagaactgagtcgattcctgtccctagtacagatcattcaatttgtgctgctcctaatagtattcaaatcaaaaatcagagagaccgaataaaggcaaacccaaaactgtttatgaaccagaccctaaagtgaaagtaaagtatcctattagtaattatgcgtcatctcataggctatctggatcatatgctctaacagttgatcaattatctactgtatatattcctaagagtgtgcagtttggaagatcctagaaggaagcaagcaatgaacattgagatggaagcacttcagcacaataaaacttggagattaacttctctaccgagtgggaagaagacaattggatgcaaatgggtatacaccgtgaagctaaaagcagatgggagtattgatagatacaaagcaagcttgtagcaaagggatacacacaaaggtatgaagtagactatcaagacacgtttgctccagtggctaaacttaatacaatcagaatcctaatatccattgctgcaaatagagattgccattgaaacagtttgatgtaaagaacggttttttgaatggtgatttagaagagaagtctacatggaggttccacctggagtgaagctaactccttcaacggagaatgtagtttgcaaactggaaaaggctctctatggccttaaacaatcacccagggcatggtttggaaggctctctttagcaatgaagaagtttggttaaaagcaaagcaactcgaatcataccatgttcataaagcataacaaagggaaggtaacaatactcattgtttatgtagatgatatggtgctaacaggggatgatatagaaggaatgaaattacttgagaagaaattagctgctgaatttgaaatgaaggatctgggtcctctaaatattttcttgggatagaaagtgcaagatctgaacagggtatatttctaaaggaaatacattttagattttctgtccgagactggattgatggcttgcaagcctgctgatacccgatggaagtgaatcattctttgggtatttatccggatcaggttgaggtagataaaagcagatatcaaaggttggtaggaaaattaatttatttatcacatactagacctgatatcacatattctgtaagcattgtaagtagattcatgcactctccgatgaagagatatgaaggcagtgtatcatattttgagatatctcaaaggttctatggaaagtcttaaaataatatagcgtgcattgaaggaacacagactcagacttggtaaaaaaaaaaaaaaaaaaaaaaaaaaaaaaaaaaaaaaaaaaaaaaaaaaaaaaaaaaaaaaaaaaaaaaaaaaaaaaaaaaaaaaaaaaaacaaacagttggtggatgattttcagatttcccatgttcggtcccaggagcaacttgctgatgtattaacaaaagctgtctcagaaaaagtgtttgaggcatgattgatattcatgaacgagtggagtgttgaagattgaaatactgttatattcagttaactattattttgtgagttgttattctgtttagattagaggaaagttgttattctgttacaaattattctgtttaggttgttattaatattgtataaatacaccttttaagaggtagcagatatgaaggaaatgaatgaatagttctctggattgagttttaacaaaaataaaggggaaaattataataccgaggatgttggaggagtgggagaagacggggcccaagattctcaagtctctagcgggaatcgctgcgtggcggatgatggcgttcttctccaactcacaagttctgaccggcccgatcggtcaaacctcatccacaagcgggcgccgccggtcttcttcttcgccttcgtcaaggcgcagctgccggcggcggcggcgataggacggttgttgttgtcgtcgggtgaggttgcgattccggccgcgtagggaggctgcggcggagacggaggaggaggcggggcggcgttcttcttgggtcggcggcgagaggtggagcggcggaagaagggaccctttcccattgtgattgagaataataattggtaaacaaaattattattgttgttaaatgattaaattgaataataataataataataataatagaagagtgaagattgttgttgttcttcttctccttcaccttcaccttctctgctttgatcctccataaaggagacgacactccttctctgccgcacactccctatttgtttttatgtttgggacggctttaattattgacccaccgaccaaagcaaatccaaagtcaatgggtgtggaaataaaaaagtttgttattacttattagtaactgcatctccatcactcgattatcgttatttgtatttttttatacattagaaaacaaccatttttatattaaatttcttaaaaaacttatcgtttaatatcactttttatttattatattttacagatattttattttgttatattaaattttaaatattttcttttattcttttatatttttgaaatatatcattttttatttttattttttactaattacattaaacaatttcaaatttaaaagttaacataataataatttttttaaggaaaattgaaaaagaatcaaaatgatatatttaaaaaaaataaagatcataattaaacttttaaaacttaatatacaaaaataaaataattatgaaacatatgaattaaaagtgactttaaacataaagttattattacatgtatgattatttattaatttataatatttatcttaaaaataatattaataatgatttatctttgatacaaaaaaattgtatgatgacaaaacaaaataattgtttttttattatctatcctcagaattttggtcttggtaattatttttaatattttaaaataaaataaaaatatagcaaagagagaataggttcattacataaaaaattggaatatttttcataaataattgagtgtgagaaccaaatgaatagaaatataagaaatctagacattttgaaataaatgaaaaagagtctatttctattaaataatttattagataattgaaaacagaaaatgtcgagaattattcgcaactaagaataattacaataaaaaatcattataatactacatctatgttagtattttagtgccacgtctgtattttaattaaatattaaactaataaatgaattaaagttatacattaaaatggtggatggactaaatttataataaaaaaataaattttaaaaataacaataataaaaagactaaaaatgttttaacaaaaatttaaaaatatattatgagtattatttttctttaggagaattaatctttatgactgtcacaaataataattctttaggagaattagattttatgactgtcacaaataataattgtttgtcatgtcatcttggtcacactcactaatgaaattaataaataagaactgtaaagttatattttctaagagttcaagaattaattcattagtttaaaagcatagaaattaagatattttttgactaaaaatatacaagaactaaaaacacaaattttcttagtttaaataggatagtttttttcttcgagaaaaataggattgttttttacatttacgggacacaaatttatttttgaacaactttttctaccttaagaaatttctcaagttttctttaatattttcaaagttttcacttactttaatgggttgttaaactccttaatcaatcttagacaattaatctccgacgtttctattttcttcttttatctttctttaaagtcttgatcacatttttagttgaattgacatgtagtaatttcaaatatgcaatatgcttttagttcacaatctgattaagattttagtcaagaaaaggaattactcgatttgaccattatatgacatgcgtggtgatgtagaactgtggtgtaattatgggttaaaaagggatcaaagttccaaaaggaatgtcagagttttagtattaaaatctaacgtcctaagaaatttatatagagttcaaataaaaaaataacttaaaaatatatccttctagtattaattaaatacctcaatcatcattttattgttactgttgttatataaaatgatcaactaaaaatcaacatagctactgatagaaaaacttttggtacgaatccttacgtattaacgtcatagtattttttggatacatattaagaataaaagaaatcaagaaatttgaaataaatcttgcaaaatccttttgttgagtttgtgtgtaaagatttaatcatttattgacgcatttcacatttccctcttgttgaactacgttctatttttaaaattaagtaaatttaaacctatctattattcttccacctttttttgatacattctattttacttccacctaaaacacctactatctaggaatttacaaatgattaaacatttaataattaaaatttagtagaaacatgagaaaacttgaaaaaaatttattgtaaaattaggattaaagaaggagaattgagttatttattttaagtaaaacttgttgaatttaggaaaaatcaaacaatttaattgatttaaatattttaaataaaaaatataataagggtttaaataaaatgaacagaccaactttgcttaattttaaaaagtgaaaaactttatttgacttgaaaaaccttaaagaaacaaaaccatagataatccaaactaaaggaaccaaatataaaaattaactcaaatttatttaagagaaaaatgttagcaacacactcctcttataagataattccttggttaaaagaaacatgttgaaaaattttcattcatgtaaaataacattgaattctgaacattagataggaatcgcgaccaagatttaaatcctaacttaacagcttcaaattcttcaaattgaatgaagatcatatctaggttacagtataggggacagaaatacaagaaccgcatgttatgcataatcaatgatgtcatgtatgcagcaagaatatcttaagttcccaactctttttccattactcatgttgatcccgtatattaaaaagccaccaaagtagcaactaaattaaaattaattgccacacgtgaaaggaaaatccatgatccaaaaaatacatttcatgcatcaactgaatctactactctgcttacccttggcattatatatgcgcatatgctaacacattataaatgttactctcaatgcaccagccaaccaagtacatcaaaagcagactcaattaggaaattagagcactcatgcagaatgtgaccacatcatctatattttccaagctccatcttaattcctcttgattgttctctgaccataatgtatctattattcccgcaatggtaaatataactgtgcaggaaggttggaatccatttctaatcagttgcgtgagacaaaaacttacatgtccttaatgtacagacaagtcgattatgaatagcaaaagcactcgatacatctagttcatactagctacaaatttaaattatactactttcatttagagcttaattttgatacattgtcagtctaaagatttttatatgacaattagggatagatattaattatacccagactctatgggtacccgctcaatggaatggatcaaggtctgggtatttacagcaaaatttaatgggatggatgcaggaacgagtactattagtctagtacccagttcatcccacacccgcatatatatatatatatatatatatatatatatatatatatatatattaaaagagatctatgcactcactatcaaatacagaaatttacatacaaaaggtaattttaagtctataaattggctttaccatcattaccaattttttgagctgcaattcttagcagctatatcagtaggcgaatattctaagacttcctttggttaatcaggtggttagtgcatccggaagtgaatttggtgatccaagaattttgccaccaacatcaggaaaggattcataatcatcaagtgcactgacttttccatccctgctgatcttaactggatattgcatcaagtgtcccctcatccgattctcttcctcagacacatatatgtcccagtttcgtttggcaattttattgacatgtctgacacattccaggttatgaggttcagcaaaacaatgatcaagactaccaaggtgctcagcccacagtgacattctgtatccatacacctacaccaacacaatctttgagggaattgccaattactgagaaaagaaaagatgaaattacataaccaagatctattcacagatctgagtttatgctacgagtccactagtatgagagggtgtcatcaattatgcttacaatgatttattctgataaaatagtatacatgatttatccaaaagatataaactatttaatggtgggttggctctataacactttgggctgatacaaagattggaacctcaagattatactttcacacacacataaatatttagttaattaactttttttggtagtgtctaattatttcgtgtgtttgcaatatgtgctatatatatatatatatatatatatatacatacttttatcttagattaatatgctcaattcctatctagtacaactattctagctcattaacaaacgtagctggagcttcaaacctggccacgtggatgagcattcttttctgtccatgtatattttggttgataggcacccatagctatttctgtgtcccttgaaccatctaaggatctctggttaatatttgctgatccaataattacgtattcgtcatcaactaccattcctttggcatggacataaatcataaaacgtctgaattttttaactgatacctgattatagaaagggaaaaaataacaataagatcataaactatcaccacataaatagaaaaagtctgcaaatggatcttgatgcaccaactgattacttctcaaatgtaaatatgtaatggccattatataatgctgacacttatataatttattcaaaactaagtaaatattcatttggtagataatccatgatcatttggcactaggcatatatttcattgacaaaactaatacaaacttatggaatatctgtgtgaaatgttgaaaatgataaaatcagaaggaaatattttcttttatttcatactttttgaagttgtattttccgtccaaggaatttgatccagaagaccaataaacattttataaatttaacttaattatgtttaagttaacttttatactaataagtgacacagatatagatatgaaggccgggactttaatctccaccaacttcattcctgctagacgagaaggagccaccttgctcattactcatcacacatgtatgaaacttgctttggccaacataaaaagcatttataagtgttctgtatgtttccagaacacaaatgtataacaccgaagtgctatgtggttgctgtttgatcactctaactctggagttcaagggagtcaatggagaatgacaccttgaaacagaagatcacagagatacaccaatggaagtggggtgtgtgctctgtgtaattgaaagagatagagtcagagtgtgtgtgtacctttcaccaacgagcaagctatatttatagatgaaatacctaactgttggctaactgcattgtgcgcgagtggcttcctatatttccggcctccacctgcacgttcataactacctgagtggactgagtcttggtccacgtacgttgaatctcaataacgcatcgtaactaattgggccttaacataggcccaattatgactccagaacagttgccccccagcccggttgcggagtacactcggtagccggggtgctttctttgacgtcacggttgttgggttgacagtctctccgaccacgattacctgccttgttatagattacggatacgattctccgaccacgtttatccgggttcaccctatccagacattttgtgggcgaccctatgtaattgtcctattcagtcaacatccgaggtcggaatcatatacctgttgaagaaaaagatatgttgccgaccctattccttaggaggatcgtgtccggattttcggcgtaaagcatagtcgacctacatttcatccggatagccgtcctcggacgaaatgcccccagatatctatcccttgggttttgaaaagctgttgggcttccaccctggcgtcggttactgttctttataattaaaggtaatgaatgcatttaatgcacctgtctcttcactgacctggtgatgattgttatggacgtgattttaccataataccctggtgtcgtttcagtttggcaactgagccgtttcttttcttctggcggttactgaaaactgccctcactttttcaaatttgattttcaaaactgcccattcgtgtctactactccatcgcttgtcatttctgcttatttctttttctgtcacttcctcttttcctctcattatcctctcgagtgtttccttgcgccttctgcaaaatcttccttcgtttttcaaacatcttcaacttcttcgttatcaacaggttagtatcttcttctcttctttttctgcattgtttgttgttttggcattgttgtgtttctgtcgatatcatcatttcttaggatttctccacagtttctttctggctattctttagttcttgagtttttcttcacaccttttgggtttctgggtttcgtctttcttctctggtttacttcattctgtgattattcgtttttgagatactatgaaattcacccctgaagaagaggcgaatatacgcaggaaatttgggccgcgttccgcttggctgctatatggccttccgcttccggcgggggaaaacccaaatgaccccctgcgccgccatactggcggttccttttcttccaaaaagcaagggaccaccgcctctctcggtggtccatctccttcatttctctcactacatccgggtcctgtagaccctaacccggaacttccagggccaatagtgtccggtcccatctcctctaggactacgtcttctttgggcccttcttttcttgggcccaatgttgacattggtaacccccaaaatctctctttagtcatttctagtcgtaatcccaatcctccggctagcccttctcctcgttccgggtacgaatcgtcctcggatggagtgataactattgagtatgaggcctgcatgaactgtgtgtccgaggccgttaactttatccaactggggtccgacgacattgcagattcaatccttggaatgtgtcgtcataaccctgttttgcgtcctgctttcaaaggctcgcaatctgggcggcccgctcatgctgtcgtcggcggggtttcggcctcggtttctcgtgattttaatgagttgtctccaggtacgttttactaacttactttcttacttcattttcgtaggtataatgggtgttactcccgacacagtggacgaatctgcttcagtcgagtctcagtccgaggtccccccagcgttagcgtctaggttcccctgggtcacccatgagattcttcgaacctcctccgcccttggtcttcatagtatactgtcgaccccagtggggaggcaggacaggtttgtcctgcaggctcccctacccggcgagccactttgtgctcaacgggagggtaacgatcctaatttcttcttcttttttcaagatgtagtaacccaaataggtattatcttccctttttcttcttttgaaattgaagttttgaaccaccttcgggtagctccttcccagctccatccgaatagttggggttttatccgttgttttgagttattctgctcggatttgaaaatcccgtgcacagtccccctcttcttttattactattctcctcatacccctaggacgggtagggagccttctaaccggaagggatggatttccttccgtagtcagagtaaaaggaaactctttgagcctttttcggattcgttccggggcttcaaagacaagtatttcaaagttgctgcgtcgccccattgtcaacccttcttcctgtccgggcctgagtcttctgatgtggagtgggtctttcctttgtactggtcacaagaccattataaacatgatcactccaattatcgttttatcgaggaggaactgtccgactcggacgcctcctctgtcttcgtaatttctgaatttgtgggtgcttatggtcagcccaagacttctgactacatcggcagcggacgtcaaactggtctgctttggtaattgtattttcttggttcacacttgaaatttatgctaatcttgtaaatttttctgattgtagccggcatgggatcccgacctcccccaaagtccaaaaccgacgcggcccacctttccaagccgactgaggccaggggcaagggcaagaggcccgccaatgacaaccttggcggcgcgcccaagaaacggggtggtccttcttataggacattctttgatggcggccccccagttttgtcgttggatgcgccgtcgactgcacagcctgcccctgcacggcctgccccttccccgacattgaatccggtcacagtgatcgatactgtggaccttactgtggccggagatcggtcgcgtactactcctccttccgactccgagcagctccgggcgcgggatcgttcggataacttgtggaaaaaaggggttactgaagcattggtccgtttgaccaagcccccttcttatatgaccaacccgggtgccccagtgggggaagagctggacgagatggtcaaaattgaggagtacgcgtaccgcagcgcctctctggcccgggctcttacttcggtccgggaaaagtaagtgttctttcaataattttttatctctatttgctcaataaatatgcttctaagtgttgtcgtcgcagatatggggtggctttggaggaaaaggagaaggctttggaggagaaagataaggctttggaggagaaggataaggccttaggggaaaaggacaaggcctgcacggcgcttgtttcccttgaggctcaactcacttctctccaaacgcaatcggcggcggaggccaagctgttgaaggaggagctgctcaaatctcaagccgactcggcctcgttgcgggtagagttggctcgatcactgagttcccttgaagctgcggaccagaaggtggccatgctgacctcaaatttggattctgtcaaggctgataaagaagcctgtgttcagaattatgagggtcagttggctgctatgaaggcgagccttcgtgatgctgccgaggagggtttcagcaacgcccttgaacagattaattttttgaaccccagggtagctatgactactgccgggatgcatttcttggcatatgtcgaagacgggcagcttatccctcctcctgcatccgaagagcctttggcggctacaacagaagttgtgtcgacagaagagcctactcctgccgatgctactgcttctaccgacgccgcccacctgtatccggccccgtttctgattcccaacccccgcaaaactgaaggaccagaatgccggttttatcttgtatttttctcttgaatgggcccggtgcccggaacaatgattttaaattctttgttgggctcggtgcccggaacaattagtaaatttgtatataaattgttcaagttcttcacttgattcgtaaaatatcttgcgcgcgcatctttttggttccaatgaccatttgttatatttgcatgtattgtatgtcgttcacgttatccgaccataaacaactttgctaacgaatctgttgtccggcctgatcagggccgtttagcatatcatttatagtcgttatcataccatgaaaccgtatagaatggctcaatacttatggtattcaaaaattcttgcatttatatccgttgttacaataacaatatgtgtgtccgagtaggatcaacactttaggattacaacgatataacttattcaacaaaatgaaaattttgctcaggaaatgtcttcgtcgcgaaagaggaccatatgggctcggatagacctatccggaatccataccctcgatcacgagatcgtcctgttcgacttcctgatgaatagggaccatacgagttcgggtgttacttttcccgaatccatacccctattaaccagtaggtcgacagtttaactgtaatattgcttcaacttgttcgcattccatgttcgtttgaccggcttaccttgtagtgtttctaacacgtacgctcctttatctaactttttagcaacccggtatggaccctcccagttaggtgctagttttccatcccgggcattcttgtttccgacgtcggcacgtcgtactactaagtcggttttttcgaactcacgtgggacgacctttttgttgtacttatacgccatttgctgttttacctttaactcctgggcatgtgctgctagccggacttcctcgatgattgtcgactccagagctaagacttcgttgtttgtttcctctccggatagcaatgcttgttttcgtcgccatgactgttgtccgacctcgactgggatcatagcttcgtttccgtatgtcattcggaatggtgtctccccggttgatgactggacagaagtccggatcccccataggacatagtataattgttccacccaagtcgatccggcctcatacatccgcttccatagggcctccagaattgttttgtttgcggcctctgcttgtccgttggattgaggatgctctactgatgcgaaccggtgtcggatgtggaaattagccatcatctcttggaatcctttgtctatgaattgggtcccgttgtcggtgattacttctccgggaattccaaaacgagaaattatatttctttcgaagaatttttgtacccgggccgacgtgatggtgtttgacggggccgcttcgatccatttagtaaagtagtccacggtgactattagccacctcatctgtccctcagccggcttgaatggacccaggagatccatgccccacttataaaatggccatggggccgagatggattgcaattcttctggcggggataataaccttggcgcatgcatttggcagctttcacaggacctcacatgttttgtggcgtctgcgctcattgtcggccaaaaatagccagcccgaagtgcctttcttgtcagtgcccggctccccatatgctgtccgttgattccttcatgaatctcggataggatatagtcgacttggtttggggccacacataccaacaaagggctatgcaaccccttcctgtataattctccatcgaccatcgtgtacatggccgacattcgtgtcaggcgtcgggcttctaaatcgtcgtctggcaaattcccctttccagaaaatttactattgggcgtcgccaatcctggtcggtggtaatcatcattacgcacgtcggttgcatcgtttgctgttgaattactgttcggttgttcccgggttttttggtgctcgccagctttgataggatatctgcccgggtattctcttctcgaggaatgtgattcactgtaatgtcgtcgaactcggacatcaattcatttactcggctcaggtatttggccaacaaaggccctttcacttggtatcgtccttcgatttgtgccgcgactagctgtgaatccgtgtaaacctttacgctcttggctccctgttccttggcttgcaccagtccggcgatcaaggcttcgtattcggcttgattgttcgatgttgggaagcctagttgtaatgaaatttcagttgctacccctccgagttctcgattataatcccggctccactccctttcttgttggaagacccgtccacaaacaaggtccaccactcgtcgggcattgggttgtgaggggtgagttctcggacgaagtccgccaacgcttgggacttaatcgcgtggcgggcctcgaatttcaaatcgaactcggacaactggacggcccagttggtcagcctccctgccaaatccggcttgtgtagcacctgtcggattggctgatctgtccgtatgacgattgtgtggctctgaaagtatgggcgtagctttttggcagcgacgatcaaggtgaaaactagcttctccaacttttgatatcttaattcggagtcgcgcaatgctcggctcacgaagtataccggcttctgcgtggactctacttctcttactaaggctgcacttacggcttcttcgcctaccgacaaatacatgatcagtacttctcccatttccggccttgatagtaccgggggtgacgctagtgactgcttcatgttagtgaaggaggcttcgcattccgggttccattctatggcggcctgtttctttagcatcttgaaaaatggcagtgctttttctgctgactttggcataaatcgggtgagagcggctattcgacccgtcagttgctggacttccttcttgctcgtcgggaattgcatgtccaacacggcgcggcacttatccgggttggcttctattccccggtgtgttagcatgaaccccaaaaattttccggccccgactccaaaagtacattttaacggattgagccgtatactgaaccttcgtagccgaccaaaggtttcttcgagatcttcgacgtgtctgttagcatctgtcgacttgacgatcatgtcgtctatgtagacttcaatatttcgtccgagctgtggttcgaaaactgtgttcatcatcctttggtacgtggcccctgcgttcttgaggccgaatggcatgacgttatagcagtaattagccctatcgccgatgaatgccgttttctcttggtcgtccgggtgcatagggatttggttgtatccggagaacgcatccataaatgacaatactttgtacccggatgagttgtcgaccagttggtcgatatttggcatggggtaggcgtccttcgggcacatcttgttcaaatcggtgtagtcggtgcacactctccatttttcgttcggctttcgcaccattacaacgttcgacaaccaagtggtatattgaacttcgcgtatgaaacctgcttgcagcagttcgtcgatatgagcccgcaaagcctgtgctctctccggccccagtttgcgttttttctgttccaccggcttcgaccccggatacatggctaatctgtggctacagaaagcagggtcgacgccgggtatctctgacgccttccacgcgaatatgtcgatatttttcttcagacaacggatcagcctgtccctttgctcaggttctaatgcccccccaatgttggtcacctgaccggctgaggctccgattacgatctgttcgactttcttcacgggttttggtctccattcatctggggcttctcgcatatccagctccacgacgttaacggaacgtattaggttggaaatgttgttgtcggtgtctttctcacttttacgaaccgtgtcgtaataacactgtcgcgactctttctggtcgccacatatagttactactcgtctgttgttacccacgaacttgagtttctgatgtttagtggacattaggatgtcccatttatggatagtcggtctccccaatatcatgttgtattgggatgggaaatctgccacgacgaactccacttcttcggacttgtaagattctctcgttcctagggttaatcgtagacggatggatcccatcacatttgtgttgccgccgttgaaaccgatcagcatcgtcttgcagggctttaagtcttttacatccaacttcatcttccggaacgcagtcaacatgataatatcggcggagctcccattgtctacgtacattcttcttaccctgcaatttcccaccgttgccgatatgaccagcccgtcttcatgtccgggtaccactccctccatgtcctgttcggtaaaatacaagagaggaggttctggcttttcgacccgggctttgaatctgggttgtgcctggaccgacaatacctctttcaagtactttttcctttgggtggaagtgtcgccgccaccacccatacctcccgagatcacgttacactcgaactcgggctccgggaactcgtcattgtcttcccggggtttctttccttcgtcttttcgttgactttcttctcctttgcgtttattctttcttccttgtgttcggatgacgtactgctttagccttccttcccggatgaacttctcgatcgcatcccgcaggtcccagcattggtcagtagtgtgcccgggtccgttatggaactcacagaattgtgacttatccaatccggccttgttgaaaacggggcgaagacgttccactttcttcatttctgtaaatgcaacttccttccaaatttgtgaccgggacacgttcagtggagtatacttctcgtatttgttttcatatcttgctggtcgggattttggttcattattccgagttcgattctcggaataccctctattctttgggggcggactcctcttatcatgacgttcttttccacgtccagggttattgacgacttccatctgttctagctccaaatatttcttcgcgcgagcacgaaactccatcaacgacttcaccgggtccttatatatggacttggcaaatcttgatgaaccatcgagtccggctgatattagatacacgtggactctctcctccaacccctcaacttgcagagctgcttctttaaacctatccaaatagctttgcaaggtttctccgggtagctgtctgactttgcccagagtgaactcggacttcggctgctttttgctggtcgcaaaatttaacaggaacttctgtccgaaatcttcaaaatttttgatcgacctaggcggtagggtatgaaaccacgtctgcgccgggcccgtcaaggtcgtgacgaaaattcttgatattatgggctcgtcaatcccccggacacacatttgcaaatcgaactcgtcgatgtgcacttgcgggtcctgtgttccgtcgtattttgataggaaagatccatcaaaatcgtccagatatcgggccttcacaatgtcgtccacaaaaggactgttattttgatgcccccgactatacttccgacggtatatggggcccgtcttctgacagaaattttgttcgcccttcttatcgtgtccgtcatctcgcggaatcttctcattacttacccgtcgactaggattgtcgtcggggatctgtcctacgtcgacctcgtcacgtagctcgtctcgactccgattcggttcgtcattcctcctttgatctcccgggtcggcgtcgcgtcgatgagttatctgagttctcaaatcttgtggctgctccatccgcctttgaacctccgagtctgtattccttctttgattcaggtgcgtcctcaaatcctccgtctcgccctcaggatttgagagttgcacccggtcagctatcattcgcagctgttgctccaattgcgccgttcgttgcatctcggcacgtctccattcttcattatgttcttcaatttggcgagtaatgtttcggatgtcgtcttgtctttgtaaattctgccgtttctccatgttctcaattcgggttaggattgaattgaggacattgctaactaactgtcctccgagctcaccctcctggcctatcctccgtgctataggagtcttctgttggtctgtctgggcgggagaggaagcttcgtcggaaacagcctcggtcacgtgtacttcttctctccgcgccacattctggttctccggtaggtaaatctccctgttcggcatctccaaatgcggtacggaatgactgtttcttgtgttaaccattgttgaaaggtgtgagactcgaaatttaacgttccccacagacggcgccaatgttctgtatgtttccagaacacaaatgtataacaccgaagtgctatgtggttgctgtttgatcactctaactctggagttcaagggagtcaatggagaatgacaccttgaagcagaagatcacagagatacaccaatggaagtggggtgtgtgctctgtgtaattgaaagagatagagtcagagtgtgtgtgtacctttcaccaacgagcaagccatatttatagatgaaatacctaaccgttggctaactgcattgtgcgcgagtggcttcctatatttcctgcctccacctgcacgttcataactacctgagtggactgagtcttggtccacgtatgttgaatctcaataacgcatcgtaactaattgggccttaacataggcccaattatgactccagaacaataagtaagaatctcacatttataagtgcagcacttaacctcccagacatgtgatttccaggacttgttaatccatcaagattaggtgctttgaattcaaacttcgactatgttgtaatttctatttagtgctttgtccaatcataggtgggtaatgaatgggtaagacagaccacccattattgaatcatgcactatggggagattttaatacttacatgtagccagacatgagacaccatgaccactgtaatgcttacaattgattagtttgaattcgctcaagagaaaaccctagggatactcatagctccattcactaatacacaatccaattacaaattagggatatactcaatccttgggattggttgaatgaaaatacagactatataatgtgaatgaacacactttttcaacaatatactttcaatattttctttttctttttttaatcctataattaccaatacaaatctttttcattcatttcaaaatattattagtatacttttatttttatttacatgttcgatccttttaattaataaatatatttttgataatgcaccaaacattaagccaaaaaattataaacagaagagacaggcaatggtgcgtccaaagcgatcccaatccattacatccaaatcatcctccaatctgaaccagcgtcgccacctccgtcatcgagccaccgacggactccgaccgcgccatcgccttcgtctactactccccctccgcgccgtctgcttcacctacgacgattgtcacgtcgttcgatccatcctccgcagcttcttcgtcaccaacgacgagcacgaccgtgaagagctgcagcacatcctcggctgccggatgaagcaacaacgcaaccaaacgcacaggatctaagtttatttgttcagatctgagtttctttgcacgcacattgccatttgaacttcaaccgctcatactttcgcaaccttcgtgactctgttttgtgttcattgttgttcttgtgttcatagctgttggtgggtatagggggttagggttgcgagcggaattggtgaaggtggctgtggtgcgtgcccgcgacggtggtaaggggtcaggatggttgttggtgtttaggaaaggaaaaaggttagagattacgatttttttttttttaaataaaataaagatagtgatgattaaaaattattactgtattaaaataattatttaaaatttaaaatactaatgaaattaaatgttttaaatgaaaaactgaaaaaagtattaaaatgatatatttcaaaaatataaaagataaaaatgaatttttaaatttaatggatcattaagtctatttttgagttgtacccttttagataatttcttatgctgtaataactataaattataagttgttgcaggattttctgcattatgatcctaagccttagtacacaaggtaaagcaggcacaacctattgtcgaagttgttatcaatttgtagaattcaaatgttgctataactattctgatgaatgatgaaggcattattgtgacaagaattaaattcttgtgttttcataatgagcacgtcaagaattctaagtgctgttcaataagtatttcaaactgcatgcaatgcctaatttggatatggaaacacaagtgtagttaagtttagcataccaaagcccggttttcagatgtatttggtgttggtgaaatatttgtggattgtggttctctctttccaaggcagtaaaaattgagataatcttgtggatgatactgataagagagacctgctttttcaagggcatcagctacaatctggtacatcatagacattgtctgtccctatagtcatccaaatttcaaatacatgggttgtgataagtacacttcaatcatatttgttatgccaaagaataaacgaaaaacgcagagataaaaagaaaagaatacatatattattgtggttcagctaatgagacctacatcacagacaatgagtctcaaacattgaaacaatgaacatccctatttttactctaacttgcaagtcgataaatccatttacattctaaggaagtacataaaaaactggcctcataattcaggacaactcgttaacaaaattccaggcctctcaacgatattcataaatttgtgtcacttatgttatgtacatctattaaatattggaatatcaaaccccagattcatccttccccttatggtttgtgagttcattttcttcaaccaattgaaggcgaaggaaaaaaataagtctatgccaatatataaattgaacgaaaaaatgatttaggatggcagtagaacagtttgaaggaatttttttttgttgtttttttttttttggtacatagtagaattttaatgacaataagtctgttgcatttgacaagtttgcagtgattgtggattatcattaaccacattgcactcgtttccctcaaaaaaaatccattaccaggtaataatatataagtttgtggaagaaacacgttctaccaaactgacttcctaatttagacagactcacatgaaaagtactgaaaatgttcatctgcaaattttaacaagggaatatacagaatagaaattggtctgacctgccagaacaatatttcttgaacagcagcacttgttggaacaccctctggccacattggtataactatatatacacaaaaacgttcatttgcaccaatcttaccggcaattttcaaagccaactccatgggaaccaatggtttgcacctgttaagataagaaataaaaaccttacacttgcagtgtatttgtaaaaactacagcaatgtgtatctcacaaattgacttaatattcaaatgctactgaaacttaggatcaggagagtgatatagttcccttaaatgttagcaagaaatatgaatttgtataatgtatgcaggcatttgaaaacaatattacaaaaagagaaaaaataaagcaataataagcccttcaaggtgcacaccatatttacctaataaactctaagataagaaatctaacatggaaatgaatgcaaggttgcagacttatgtctttatctcctccttttatctcgcacatgaaccatagactttattgacttttactgaaaaaaacaagtgtatccttctttcaattttcaacttcctctcttaacatccaaaactccctctaatgccaagtctttatcttggatagtgacacttaacaggattaatatgcaaatgatttgttgtatattcatgcacctcccactaacctgtcatggttattccttcatagatacacaattatatgttctgggtctgagacatatatataggtacattacctaaacgccagaattttgattttgtaacaacgcaaaaactagcaaatgccttataaagttgaagatactgaaaaattaagtttatctacctgcattgtttttatatgaaggccaatgataggaggagcccaaaaaatactgattctcaatatatacaaagtgctcagcggatcttattgctctcacataagcagtatggatgctttgatctactttcaaattttttccacaaaaaagattctgaaacaaattaatattaaaagttaaggactaatttatctcaatataacttgaaaccacaccccaatgtgaaggtaatgaaaataacaagaactcatagtataaaggggcatcacgtataactttgttctcacctgagccttagctttgtcaacatccttaggaaatcccttcacggatcctgaatctatggacctaaatatctgtattaaatgtaaattctagttcaaatctttacttgattttatcaggggcacgtgtacatcacagttctatcaacatatttccatacctgcacattccaactctcggatcattttcatcggttacatgaacagatttatcgccgttggaacaaggagaaggtttgacaatccatgaaatccggtctagccttagcaaagcatcatcatgccaatttgtcacctttttgagcctgaagtcgcgccattttttggccttcctccatctttgttcaaaattggtcaatatatcatatgcgctggaccttcaattttgcaatgtaagtcatgccatggctgccttggtgcacacgaatttgaatgtaactgtttcatatagcacacaatttcagcaaattcccttatgttatttttttctcctttatttggtgctgatgtgtgcatttgttttccttctcactttcacccataaaaccgtgaatatcaaaccatagcatatactatgtgtatataaacattgacataattgattttataatgacatatgaacactctcataaggcaaaatcaccatataaggcaacattgaagaccaacagataatctagcaaatgaagtttatcaaaattaacagacaaagaagaagatttgggaaaactcaagcaaaatcagaaataaaaatttggttttgtttagagcacagcatcattctttaatctatttaccaagcccaccccagtgtaaggctctcgcttcttgttgtcattattgttgacaaaaatcagaacacagaaaaagccagaagttggtattagtatctttattccactgtatgcacataaagatatgttttataaaattccctagtagtataataaaagagaaggcatgctatattcttgtgaattcttcaatgtttacaataaacacttacttgaaatgtaggattatgaaaatcattatgaaacactgtatctagatcacgaaaaagccgatgctcaggtgtatcatatctaccatcacatagatccaaaccaccaatgaaagctgttattttccgattattcccagaacctagactgtctacaagaacacatttctggtgatgcgtaaagagggttcccacaacctggaccagatgattcaatcaaattagtattgttttaagttatagctaaagtacacaacgtgacctcattatatctatgactactactaaatgcaagtcttccagggaagaaataatgacattgatggtgacatgaaatagctagtatctttatccaacacaattctaaactcaaatgcaagaactccgtgcctgttgcttgaaaatactgagcttattgcttgcatagcgtggagatagcacacaatgaacagtagaatgtttgaaaaacttcttagtttcttcatcatgagtctgcatgacaccatcctgcaatcaagaaaatcaaatattataatgtacattaatattaaatcttagtgaacaggagtaagtacaaagtttttatgcaaccatatctacattacaataatccatgaaggaaatatctgctaaaacttatattttaggaatcttgaaagcctagcatctcattactgaatgttaatggtgcatatacaagatagtctaagcaaatccaccccataaagaagatacatcaccactatcttttacttcagaacccacccaattttatgctaaataggacttttactttgtattactttatggtatgaaagtaatataatgaatttatttggaaagcagtgcaataattaggacaaataaaaaactaacttccctagaatttgatgaggaatcaatgacatcatgtttatttttctgattagggtaatgagaattactgttttcaaaagaaacttgtcatgtgaagttctgtcatcccaaatcagcataaccactcggagcccttcttgtgacttgtacttcaacagctctccaagtgaaagctctcccccagaaggcaatggttttgttgcctctctcacaagcctcactgggtggtaaactgaccatcctataatgtatatcaggtgatgagcttccaaaattgcatggcatatgtcctcccaacatttattatgctgaaacacttttccaccctcaagtcgaatttcaggtagcataccatcaggtaaatgtgcatcttgatatagagtcacactccctcctttcctgagagggaaatatgttttaggaactcctaatgcttttccatccccactactaatactttctgaacggttcactccaatttgcctatactgaacagaaatatgcaattcaggataaggttttaagcagtttccatactgaccaatgataggaaaccaatcattaacagtatttcctgcaattatcttctgaacaggtatctccaccactccaatgagttcagccccaagaatatcattgtccttcacaaggaactcagtttttgagcagggtgagcaacaggcacaataaattgctcatcccacaaagggttctcacagttagcaatcactctagtctgagcaatggtagccccagcaatgcatacagaaacataagggtcactagttatcatcttgtcttttccagagtgtgtctttagtccttttataaatggagggtggcacatgttgcccatagtgatgcattttctaactgtttccgtggataaatctaaatttggaagagacttggcttctattatcaacagatccaagtcaccatgtaagaaaaccggtccattaaggccttcatgctccctgtttggaaagctttgggaaataccaccatgacaatccatttcaacctgagaactcaaaaaagatgcatgttttctaaattagaacactttgttttcaggtgctaaaatccaaattctagatgcaaaaagcattatggaaaatggtttaaaaatatataacatgcatgttgatcaccttatgatcctttcagttatttcacatcatcatcttttggttgtaaggaaaccatgcctcttcaacaaattctcagaggtcagatctttacaaagagaggagagaagccaatgataagaaataaaagtaaaaaaagggaaaaaaaagaaaagaaagaaatttgtgtgtatatggattcatgtaacaatgttgcagttcaagcatggtccaacaccacgtccacaagaagcaggagaagtttttaggccgaaaatggtggcaaatctcgtggaattagaagtttggaacccatctctctcttggtttttcatttcctgaattggcatattccaaacgaaatccatgcatggagacaaaatgataaacaaatatataaagaaagagattggtgaggtggaagctgatggagagaccgagagattggagacattttgcatggaaccaaggaacttcgtgctctcttctagttacccctctctctccgatacacgtggaaatgtttaataaaaggaaaaaagattaatctatttttaacatcatgacatttttcacatttatgttttttctccttaaactttataaggacacttaacattttcaattttcttccattatatttttagtaatttttatctattttattattattttaataattatcacatttattaacttattttttctttccatctctctcttactcttccattcaatctcttttattttgaccatcataattttcagtctttttcctatgttttgattttaaatccttaattttttttgtctttgctctcaagtaacaacaatttaaatgatgacttaacaagacgttgataatttattaacttgtcatgttatgacaaatagtcatacaagtttattttaaaaaaaatgtgtttgtatgtcctcatatattcaaaattgtggacaaattttatatcataactaaattaactattttttttataaagagtatgaattacttgaaagagtattgtatgacaaaagaaataataatatggtgagaagatgtgaattaattgaaaatatatattaacattgttcctatcacttctcttgttaataattatcagatatggttcacccatattttgttcaattactatcaaaacctatacacaaaacattacaattgggctagtcatgttacttgccaattgttagggattttcttactttaccatttgaatctcaaatgcaccattcaaattttgtctaatttcaacattgtccttttgtacttcttcttccttcctttcgttttccatttcttcttacaccattcagtttctcttcttattttgctgacctcctccttccattggctcttggaggtttgttagttacattgttgtggtggtttgtacatgttgcattcacttcgtcgtggtggtggtgggtgttgcggtgcaacatcagagtaagtttttacatttgcaaaatattagatacatgtcatacattgaatatgtatgggtcatacagattgtcaatctgtataggttcaaacaaaaaaaaattatagttaatgaatttgtattatattaacacttaaattttcaaatataattatatcatttggataaacaatttaattaaagacttattgaatagtactcatgaaaataatttaaattaattgtttcatataagttgtaagatcttttcaaaagctattatagagaatttattgaaataaatttaacatagcttaacatattataatctattttcataaaaactttcagatatttacacaagtgtttgtcaaaaaataagttcaaataaattcttttaaacagactttaaataagagatttgaaagtacaactatgtgatcttatcaaagatacaactataatttcatattaatcttttagttttgttggtacatgataattattagttccattaattaaagattatgatctaggaaaaaaatctcaagaaggaaaaagactaaatactaaagacaattatcttgccacatgcttaataaataattttcctttgctatttttgatgcaattttagagcgagagaataatatttaattaatgatagaaaaagttttcaaattgaaaaaatatctattaaatattttaagaaattaacctaaaactcgtcaaatatcaaactgtattttactatgctcgattaattatttaacttaaacttttttttactacatttaataaatactagtatgttttattttcaatttaagagtattttcttgaagttgtgggttgatttgaagtattagactaatagtgggcaaatttttagattatgattagaatgagaggattgcatcaggctttaggcaaaggttagtggtgatgaggaagaagccctcaacatcgaaggctacaacatcgacacgtaactgttgtgagaatattagcatgtggatcatgctgccaagagcctcacaatccagttacggaagattaggtgttattcataggtttttcaggcggccctaagatacatcagtgttgacatcatatgttgatcatgtagcagctaaagtgtggacatggaggtagttatttctttaattataacatttaatttttttgtcattttaatttacctaattaattataattatttgcagaacatattgacttgaagttggcctctcatgggaggaaggttgagaaattaggaagacctgcacctaaattgaagatttagtggttggttcgagcttaagttcttattacatgttcattggagacaagagaagagacttttgtctgcttttgcgaagagatgacacaaggaaactaatattttcatctgcccatagaagagatgagtattacctcgatgatgtgcatcgttgttacatctgccattataagtgcttccatatctatgatgcaatagatgtagagcaggttgtagattgttagttgagttgctaggagtgactacacaagaagcataagatgagaccatcaatgtagatgagacagagcagactgtggagttgttagttgagttgcttggagttgttacttctacccattatatgtgccttccataccaaatgacatgcattgttaattttatgcatccggttgttccaaaatatatcacatacatcttcatccttcatctatgccaatgaatatatatatcgagttcatgtacttcattaattgttacatttagtattactgtctcttatagaagaagatatgcatatcttgcattgtagaattgcttcattgctgtacaattgttggcattgtggtccttcaaagttaaagaatattttttgttttgaccatcgactttgtcatatcaccaacaataatcttttcatcctcattaatcgaccaacatatagatgtcactcaatgacttagtcaatgcatgattatgagtacacatattaagttgatcatccaccttcacctcccaggattggtttcgctcacagcttgacaaccacatttttagtgctagtcatcgtctgtactaaatctatcatgtatgctctatatttttcactcctctcacaatcaattaaaacaaatgaggtctttcctctctttccagttgatgtgtcggacctcattatcacaaccacaaaacaatatcatacgcaacaatacgaacccattgcaatatgtcatcatgggtagggaacacctacaaaaggacaatacatgtttcgtcttgttaggacatttatttacttactttaactaaatagaaaatcatatcaatacttgagacattagaacaatcaatattgtcaaccacaacagttcctctcccctatcttcattcatattaatttcttcatacataatgttctcatatatcactcatctttgttcatcttaacaaaacattaaaaaaaaaaaattcaatgacaaattaagaaaactaatgaaattcgatactatagcccatacggattgacatataataattgatacttgtatatacatataaaataatttatctcttaataaaatatatccattgttattacttttaattaattctaattattttaaaaaaatccatatattttaaaaacttcaatgtagaaatttattttaaaatcttttacacttgagaaaaaatatcaatgaacaatgaaagatactaatgtaacatgtatgtagatatatcaataaatatatttttaagatatagtatgacacaattttattatttttttggtacatcaaattttttagtttatacatacaatttgttttttttttgttactagaaaaaatataaaataaactattcaaatgtatataatatagtaatatattatattgaaatttataaaaggcggtggcgtacacacacacaccaacacacacacatatatataatgatttatatctaaatttccatatttcattattattttaaatatattataaataactattttatacttttatatatttaaaaatcaatataaaaatttattttaaattttctagacttgaaaatactatttatataaatatttaatgttattatgtaatatatttatacaatatataaataaataaaattttcttatacaatatgacctatttttgtatttaactatttttttaaattcattataatttttttaatttttataatgcttataatattggtaatctgtatagtctttacatattgacaaccatatggactttatggattgtcaattgtatggacaatacgaattagtagtatttcacatatgtaaaaagctatgccgtcgttgtcattgcaacacccccatgacaatgacgatgaagtcaatggaacaagtaacaaaccaccacaagccaacacaaggaggatgtcagcaaagtaagaagaaatgaatggtgtaaaaagaaatggaaaacgaaaggaaggaagaagtaaaataaaaaatattgaaattaaacaaaatttgaataatatatttgagattcctggtgcatgaagaaaattccgatcgccaaaattaaaattaaactcttattccaccccgaccattaaagaggaaagaaaaagataagaaaaactattgtgcataaacagtaagaaaagcatcatcaaactaatgaattaaggtgcaacaatttcacttgttatcgcaaatatgacaaagtaataaactcacacttcatgatttcagctagctaactagccaatgccaaatcactataacaaaataaaaattgaacatatagatagaattagaatagcaatggataagattacatcatatatatattgatcattcgatctctccctccttgtgtgtctcaatgacaacgtctgacctaggttgagcaacacaggtgagaacccagccactttctatttggtcatcatcaaggaagctaccatctgactgatccacgttaccttccacaattttgccaacacaggaaacgcaagaaccagacctgcacgagtagggaaggtcaatgccttcgtcctctgccttgtcaacaatgtaaacatcatctgggcattcaaactccactggtccttctggggttatgagcttcaccttgtacgaggccatgcaagtgacacgaccacctcgtccacttttcagaccaaaaagagattcaccaacgttggggaatgtctttaggcttgtggtggtcataggttgcctcctcatgaaggaggtgctcaccatggttccggatagagctgctgtggtggccattgaatgcacaatgaaatgaaaaacactggaatatgctatgcacttggtttgtgttttgtgacaacttattaagggtgtgggcttgtggaaatagtgtgcttgcaacacataacaaggtgaagttgcatccaaccctatctgccacgtggcagcattgtatgcatgggtttattatctcctttatcaccacgcaaatagtggttggcacaaccctcgtatcattaatgttcaaatggaacaagttttttgtatggttctgacttaaacaagttttagccattggatgcaagaggtctatctacttgaatggttttcaaaactccacttcagtaacaggtagggaattacgtacatatgagagccacaaagttcagaaagcaactcatagttgtcacagcagcaacaagatcgaaccattgttaattttataataataaactaaacggtaaagacactacaaacattatttatcatttaaaagttaaggaagcagataagaatgatattcagatgttcatacaaaattcatttccgagacttcatcccctctttacatatattgaatagttgaaacccatgttgggaattagacatcagtccttcaagggacccctattttataaggggatgaaacagtaaccacaagagttgaatattgtactacttatctaaaattatgaagataatcaattacagccggggaaagaatctcagggcttccccaatatagaaaaataatacatcctcattctcaaaaaccctgtggattctacctgtaaacattgttaggttccctacacatgaccagaggcttcctccaaaaatttattgtcttcagcaacaaacctatggaagtgctcaggtctgactcagaaaaccttaatcgcacttgatatttctgtagatcctcctcacgaacaaatttgaacctagaaaacccacagctcctgcacatttaaagataaattataacccaagtggggcttaatcagcactagatacgatatccaatcacataagcagggtgaaaatctaaatcaaattgaagaagacttaccacatagaattcctagtccaagagaaaacattaaagtgtatccaaaataaaagctggtctggaagaagcctgacatcttcgtcttcacatagaagtagtatattgagtacaaatacacataaacagctgttgaggcagctgaaaagaaagaagtccattgccagtggtagttctcagcatttaacaaaaagtatgtccccacaattgtcacacaaacggtaacgatgataagaatcagaaagactagcagcataaagccatacacatagtacacctgtatgccacaaagaaagaaaaaatatataagccaatgtgaaggttcacccagcttccactaaaatttacacatttttttacttaaaaagaccagtttctagtattattttccttgataatgctctgctcttttgacatgcgaataacttttataaccaaaccaataagtaaaaaagaaactttatcacagaaacaagtcatagtagtgccgtgattcaccttgtaattccagaaggaagtgaatacaaaatacatttcaatgaatatgctgccaaagggtagcagtcctcccatcagagaaaccacagagggtgtaaggtaccacttcttttcaggaatgggacgaggaatagtctttacgcgacagggattattcagagcaccactccagtttcttccaacaactgtgccaagaagtgctagagggaaggagatgaaagcccaaatgacaaaaacaaccaccattgtgccaaatggaattgctgctagagacccatagaatatagcgattgtgttcaatataaatccaattccaaagcacatgaatgggaacagagaagctgtaaggatcatggatttaatccagtgtttacctaacaaacagataaaaattagttacataatcattgaaaaccaaaaagagaagaccgagacaaagccacccaaacacacttggagcaatatacagaaaattaaagaagattcttacccccatttcgggagtacatccccccactcacataaccagaaatgaaagatgtgagagcataacacacaataaagtagtgacaatggctcctcgcctgagacaagcaacgaaggaaacttacatgataatcaatgaaagagaaaggagcaaacaacagaaagtattccaactagtatgaagtagaaatagccaactgtgcaagcactgccacatgcttattacatctagtaacattagtacacaactaggttccaatgaattcattattcaaacttatgcttaagtcagttgaaggttatgcacatacccaacatacaacatcccaacaatagccaacaagacgacaagaagaaccagcaacgcaagctgagcacctgtgccaacaacagctgaaagaataactaagttgcgaggaggccgaaaaacatcaccatgcacaagtttccagccagattcttcactaacatctctctcctgtaagcatggaagaaatgaccaaatatttgacaattagaaccacaatgctttctctaggaagaacggattcatattccacaaataattaagataaaagtcacgaaaccatcaccagactttccaaatcatcatcttcccgagcatactttgcatagtcatttctcagagttcgcatcaatatcattgacaccaaaccagtaaggaagatgaccatcatgaaagagttaaaaatggagaaccaatgaatctagggaaaaagaaaacaaaggagcaaaactctcagtgacagagctatggtaggaccaacatggatgaatacatagcaattcacaaaaccataaacaacaccatttcaattttaaaagcaaagctgtacctgatgctcaaagaaaggatgtccaggtagacatcaaagcgacgcccgaaagtgatattggtagaatcccatttgacagaatatgtcatgtccaaatgttttcctacttccaaaggctttgggatatcctgagtgagattaacatgaataatctgcaaggaaacagaccttaatatgaaacttaaaggatccataacatgtcataagatagcataagatatttaagtaacttctaacctgatcatggttgtatttaacaataatgtttttgtgtgtataaatgacatgcttgccattatcactgttcttatcaggatgtaactctccaacatatccttaaaatgaaaaaagaagtgtcttagataaatcactaacatgttaagtacaaaatcatattaaataaagagaaaggagaagaggcagttctggacataccccacaaaggtagatcatctgaacttgtgtttagtgcatcacatagcagaccaaaagaaataagaacagatgctagtaagtaattcagttaaaaaagaaagagaattcaataattattaaattatttaattaaaaacatacaaggaagatcatcctttggaaaaaatcctcacaacattatgacaatcaagacaaataatatcgatgattaattaacactaagttattgaaaatacttaagaaattacttcacacagagttcttaatttaatactttcagttgtaatagtgactatattatagaaattaacactcactaaagtattctagaatgcttatgaaaaactataagggcttacttggtagacaagataaaatataagaataggataggctaagaccataataagcttatatactattcaatgtttgatgtgcaccaaataatctattatatgatatttatgctaccctttgctatgtttgaggtgaattagaaatgataaaaatataaatgtaaatgacaatattaccctttgcaagatactaatatataatttatatatatggcatatatttaaaaatacatatatatatatatatataatattataatataatttttacaataatttttatatagaataagcataagatattttggaaatttccatatactttaggtgttttctggttgcttctgctatacattttgatgttgtgtttattttattcttcatgttaccgtactgaccaaagaaataattttctgcaagcttccaacatttcttgaaagtacaatcattctacaagttgtcaattgtcatagtaataagtgaaacacacaaagcaaaacatacccatgaagaattcaaaccagtaattattctctattgcatccttgaactgtttcacctttgcttcatcgagatctatctggcaaaagacagtcttatccacatttcctgaaaaacaatagcatccattaaagccagtttgccaaccgactgctcttctatgaaatacatagtacgacagaaaccttcatactttggaacttaatttcaagttggctatcgatgagctcattgccacccaggacctcaccaagaccaccccatttgtgtgcagcacttgcactactagatggatgacaaaatgggaggctgtaatagttgtatgtttcttgtggattgttataaggaccaactttgttcacccaaaggttaactggttcatcatgttgatactgcaatttttttttttttacaaaataaaatatataatgcagtacaataactaatacatacaaaaaaaaacatcttaaaaaacagaagcgttcaccatttgatactacaaatgaaatatacatatttaatctgtttcaccagctcagtggggaaaaattccaggataacaaatatagtataggggtggggataagcgtcacaactgactattatagaaagaaaaaaaagaaaaaaaaaaaaaaaaagaaaaagagaagaacaacatatactaagttattgacatgattaacaatttgatttcgttcactgaatgataatcaattatataatctatgatagtcttctgggagaaatattaagacaccacacattggcaaagcttaaaactctatattttaaaccttctggcaaacatgtaatgggtgtccacatcaattggattcaaatttatgttagaaaataaaatccagaatctttgtctaggaagccagttgtattcagagaaccagataacaatgttattagagtaaaaaacatgcaactcataagatgatgcgctgatcttaatattacttaagtactctaaatcaaactgatccaccattaaaaacttcttatgttagggtagaatttgatttacaacctgcccagagaatcctacatattacatacattcaattatttacaatcaattttttttcatcagaaccgttccagttctaaaaagaatccatcagacagcagatatgactagcaactgttaaatttgttttaaaaactttgaatcttaaaaatggggtacacaaatagggctataattctccacatcaatcttcacaatactgaaaatagtacagatagataacaaaaacctatatagcttccatgtgacatcacaattataaccaaagacttctaaacaacaccaaaatttcttttctgttctgtccaatttcagccaaccctcttttcacacatctcttaatggatccttctatggattcaatgacaatggatgcacacaacaacaacaaactaggtaccaaagcctaatcacaatgtaagctcttcccacttcccacgtcactagtcacaatacagcctctcggtatttcaaatcccctccaaaactagctcagcattaattattataaccttaaaaaaaaaaaaacagatgatccaagatcatgaactagtaaaaggggacaaagaagtcaaattgaatctaattagcagagaaaagccaaacaatgaacagcaaacacccacattgcaaagacacctaggtgagcacaagccaaaaacccagttgagatctaacactaggaaaacacaaccattacattacaatcttaaaaccggaagaaaaaaaaaatccgaagctaagagattgaaattgagtgcaagtaagagctaaaaacgcacgcggtaggcagatccaaatcccaatgcagcaaagagagtgtagatcgaatcgaaagaagggaaagggttttgggaatgaggaattaccttgtgatctgactctgaagcgaaggcgggagaaaggaagagagagaaaaggagcgggaagaggagggatcgggattcgaagaacatggcagtgatgaactagaagagagaaagagaaagaagagacaacagaacaacgcaacaacagaggaagcacgaacggactataatggtaatttacgttgtcgacgacgaaagagaaaataaggttacgttacgactacactgaaatgaaatgaataatgacgatgagtgcaaattttttcatttcattacggtttttggggtaatacggtgaaaccgtgttctgtgactttgacggtgaagttaatcttgggctatttggtttccaatctatagtccagtacgtgagttacattatggcccatgtattcagtattcacaccccctcccccaccaccaccctttttttgtctttccactcctcactttttttctattgtgaatttttcattccaccccattcttcacatttccctcactctctaagcaccctatcaagtctcaaccccacctccttatcttcttcaagcatattctcactttctcttctacaaacacttctcttccttgttcctcattctcttcttcatgtgaggtttcgctaccttgtacttcttcaacaacgttccctttcttaaatttttttacgtgtaattgatttgataaaaactagtttcgttaaatatcttgacaaacggagattaatttcaatcaaggatatttttgtaagaaaaaggttggggtgtaaagattaaaaataagaggtgccaatgacattcacccaaattgtatgtttgggggaaggaaagtgatctctacctttacaggaggggaaagttttttcattttatgtttgttggctattaaaaaaatttagataatttttttaggaatcaaaagagttatgtatattttaattattttaccatattatataatttgtaaaaaataacatgatatttctatcatagtaataaaaattaaacttgaaaaaaacaagattctcgtcttccctaatggattttttttttgagtaacttgttaaaaatatttatgagaaacatcattttctatgaatgttagtcaaaataataaaaacatgagaaactaagtttcccaacctattgttcttagaggatgtttgataaggaagaattttttcatacccaagaaatatgattcatataaatgtaaaatgcctgaaaattaatattaatataaaatatgtaactaaaattttttctccacttgaaaaattggattcttagccccccccccccccccctcccctcctctttaagaatgtttttgcaagaatgagaatgagatgtaaaattgattttcaagaattgtgacaaacttttattaattgtatatcaaacatgaaaaacataatttatactttaagattatgaaaatttttaagaaattcactaccaaacggcctaggaaaacaacatctctagaaatactacaagggtattattcaaatgttataaagtttgtatcaatgaaaaatctaaaattaattgacttaaagtcttgtatcatgtctcgatggaaaaataaataaaaaagacactaataatagtttttgcatcgagtataatttaagtgttaaatattttattatagagaggggagagagaaggaaaagagggaaggagaagtatagagaggagagatgagtgagaggagagaaaaaggcacgtgaggagttaaaataggagataggtaaagaaaatgagcataaaaaattcaaattattatattttgcatgagaattaagatgttataattttaagtaatcaaaatattttaacaaattattagaatttgaaatatttttaaggatctcattagtatgcacgtcaatcaaatataaaatcttatatctttaaaaaaaagtttaagttttattttaattactttaaaaatcacaattatcataaaattttaattgaatgataatataatttttttacacttataccataatgtataacaattaaactcacattttaaatatactatccaaataatatatcttaacaccacaaattctaaattttcacataaattgaattactcacttcaattaatcttatctaaacacagctgattaaaaaaaatctatctaaacacaccaagtatttatagtaaaatttgattagagaatcaataattaagatcgtaactaaatattttatttttatcacaattcttaatttatgattttttatcaaataattacaaatgcctttatcataactttatctttagtttattagatttatctaaaaaatcttcgaatttagattattattcaattgattttcccattatatcttgagtttgaaacaacttcatcactattaatatatatatttgcaccgttttttaataatttagctttataactttgtctcaatttaaaaaatctcacatcttcaataaagttatattttattatccgttttcctctattaagatacgtgattatatcactattatctaataataacgataacatttctatctcttaactttttatttatattcacactttggaagatttatattgaaaagtatctctctaattaatgcgcgcttttcttcccgcaactgatcatttaacagtttggctatttatctatatacatatatcgattagagtttgattgatcagtgatttgtgctagtgcctagttagtagttattggctgatcaagtgtggtgtttgaagtttgaagaagaaacagagaggaaggtgtgtgtgaacatggagaagtaagaggtagtgaatcaggacataggggttgggagatacgcggtcgtacggcttatgcgtcacaaagaaaccaaagatctcattgccgtcaaatacatctgccgggaagacaaggtacgttgctacttatgtaaacacctgtattttgttttccaaatgatttgatggtggaaagggaaatcataaaccctaggagacgaattttttttattattattaataatattattattattatatctcttttaattgtcactaatatttattagaacttactgatatttttaatgaaaattttcctttttaattatattttttttcatccacaatatttgaatctgagactttgtttaagaaattatttatttatttctcaaatatgggttagaaaattttatactcacgtttattagttggtaataaataattattgtttgatatatttagtgttcttaaaatcggtccgtctcgacagtttggatcgaaaattaatggcctaatcggatcgattttcttattgaataaattgtgtagttgacttaggatgactcggtcaaacccgaccaagaaggttaccgaatctcaattggaccggtttaatcctgtcaattttataacttttttattttttaaaaattaattttttttaaaatttggattattatcaattgttattttggattttagaatatagatagacttttcttactcaaataatgttagttatatatttataatatatatatatatataattttaaatttttaatatataccgagataaaatgagtcaaatcaggttaattaatgacccaccgattagatcactggttttctatctggatcaatgactgtatcgggtttcacaactatgagtatattattcatttttaaaatatttaaaataatattttcatgttatatttttttaaaaaaatctcaaaattaaagaaataatatgtgaaataaaatgtgacttagatctcttgcttttaaaaaatacaaacacccattcactttaataaacattgtttttaaagcaaatttaacacttttttgcatattattgagaaggtggcaagggaaatcgtaaaccttagatctcttcgtcatccgaatattgttcggttcaagtaggtatgatctgtttttactctccctctcttctttcaaagtatttgtttggcttctattattataaaatatgagttttaggttaattttcataaaagttaataaatttatcttaatagattgtgattcagcgataaaataaaactgttttatatataatgtctgactataatatattttttcataaaataatagcattgggtaagattacaaataatataagtgaaaagtataacagtgaataagttaaaattttaaaggaaatcaataatacgtgaataatattaattggtcattaatgtctttaaccactcgttgttaatatatgtgtttatacagtacattagtattatgttgagataatttgttctatatggaatttgaactttgaaggtggccttgacttcaacacatcttacaatagttatggagtatgtagcgggtggagagctgtatgaccgacaaatttcacgtaaaatggttatggagtatgttctagattcattttggagttagatttcacaaatttcacttctacaatgctgtttttttaaaaaaaaaagttagaagatttaatatattttggagaattttaaggtgtattttttctaactattttattctgattaaaatgacaaaacatagctcctatgtatcataaagttgaaatcttttgatatcattgaatttcatgtttaatttgacatgaaggaacatgacatattctacaatgtgttgagtgattttgcatctattgttgaaaatgtgtatgaatatcaatgaattaaaagatgacgatttttataaagattacttattaaactctttaaatcctcgtttagctatgacttatagtgtgtataagattgcaaaggagatatgagatcacttgagcactcaattttaaaaataatagagactttctaagattcttctaacataaagttctttgactttaagtttaatatgaattcaaacatcacttctcaattaagtgaacttgagaacatgaggaacaagctaaaagaggacaattttgatttgtctattaatctttttgttggtcttatgttgagtaagttacctgctgaatgaaattcttttaagactgacatgcacagactaaaaaaacatatgagattgaatgaacatatgggattggtcttgtgttgagtacctactgaatggattatcaggtaaatcccatatgttcatccggtctcatctgttcttttagtctgtgcatgtcattcttaaaagaatttcatttagcaggtagcttactcaacacaagaccaacaaagagattattagacaaatcaaattgtcctcttttagcttgttcctcatgttctcaagttcaattaattgagaagtgatgtttgagttcatattaaacttaaagtcaaagaacttcttcgctagaagagtcttagaaaacctattttgtttttgaaattgagtgttaaagtgaacccttatctcttttgcaatcttatactcattataagtcatagctagacgaggatttaaagagtttaacaagtaatttctacaaaaatctttatctttaatccattgatattcatccacattttcaacaataaatacaaaattaattaacacaatgtagaatatgtcacattccttcatgccaaattgaacatgaaattttcaaccatgaaattcagtggcatcaaaagatttcagctttatgatatcataggagctatgtttttccattttaatcaaagtaaaatagttagaaagagtgcaccttaaaatcctccaaagtatacaaatcttctaactttttttttttaaaaaaacaacattatagaggtgaaatttgtcaaatctgacctcaaaaatgaattcgaaatacccaaaaaaccttaggaacgactttttttggtcgtcggtcgctagaaaacgaaccagtcatcggaaaactgtagaaacttccaacgactatatctccttcgtctaacctttgttttacgcaagtgaccagtcaaaacgatcgtctcgacgagtagagcaaaatccacaaggttttaactcatgaaattggctgaaatttttgggatctggattcaaagattgcggagagaaagttttcaaactcagatcctggtcaatcctttcgtcaaaacatgaaagtgatatcacccttgagtttctcttgatgagattttcgaaacaacaccttattctctcaaatccgacacacgaaactaatacttcaagattgttagaggtaaagggtttaagagatggatttagtgttgggtgcttgaagtgttacactaagagacatcaaatatgtaatgctcaacagtgttacctccagcaaagggagaaccttagtgatatagcaaactattggactccagtccatatggacccatataattatacattaacttattatgcttgaatgtgaacatattatttattgtttaaatatatatatatatatattaaatatattcaactaaaagtatattactgtatttcatattatcaatgcattttcataatgagtttcgatattttttatttattaatggtataaccatagacagtgattaacaaaactgaattagaaataatagtggggtgaaaaatgctaaacattcttggattaattaatataaaataactagagtatccaaaaaattgattttaatgggtatgttcggttagaataaaaaggttttgcacagttgattaattagataatttcaacgaataataaagaattagtttgaaagcttgtctggtagcatttctcttctataaaagtataatataataaataaattccaatgttcacaagtcatggctactgttcgtaatatgcaattttttctcattcttcttgtgtatacatatttcaggctcgatatttcttccagcagttgatttcaggagttaattatagccacagcatggtagatgaaatacacattagtacattactctgagaacgaattgtaatttgttttcagtgtgtgttggtagtgatatgtttttttttttttttatgaaatatgtcatcgacacttgaagttggagaataccttattggatggaagccctgctaataatcttaaaatttgtgatttcggatattctaaggttcaattgacaaaatcatatataccaaccttgaatgcttaaacaaataaccaattaaatttaaatatacattatttgataattttttcttctgacaagacaacctttacttttctagtcatacctacttcattcgaggcctcattcaatgattggaactccagcctatattgcaccagaggttctttctgggaaagactatgatggaaaggtaatggaaaggtaatactacagtttctaactttagatcatgaaaaagactagaagattcatgttgtattaattatagactgatacaattattcagcagtcacttagaacacgcagtgacatttcctttttagagtgaaatagaaataacatattttagtgactactatgaagcacttaaaatgccttagagttaactgattctgacttgatgagtttctctgtattatatggtagttttgttcattttttggctgatgtgttactgttttgtacctgttcagttggcagatgtatggtcctgtgtgttggagtttttgtttaaactctatgagttatgaataagaggcggttaacaattcaaaatagtaactacttataaccgctcttgggaaaggttagaaaaataactactcccaaccgctccgataaccaacggttacgatggtttatcgccaagagtcgcgatggttcatcgccaagagtcgcgatggtttactgacaactcttcaccagggttgtttgttgtctataaatagacacagagacagtcagaaaaaaggaaggagaaaggaaggaagtagaaaactgatagttaacttttctgatagtctcgcttagacactagtgcatttcatatcacataactctgtggttcctcaagcattgtctttgttcgtttgggctgttgatttgaagtgccatcaatcttcagacgtgatccgttctatcctgggagacaattgttcattaacctttggcatcaattggagggaacaaattgtcttaaggagacaacattgttgggctcggatcctttcatctctttgcatctgtttctgattcatacttatcatacaggttctatttaaattgtttttgtacagttgtagtagattatgttgttcctcttgactactcagattctgacccttgtgcaattggatatattccaattctaaattaactaatagttccaacaatcttaagacaatttgtttttgaatctgagttcagtatattctatctttgtgaattatatactgttgtctactctctgtactttgaacgattaatctgtgtgattaattagtgtttctgtttgtgtaacagaaatgacttcgacaagtgcaaacttggtcatcaacaacaagactccctctgtttcaactcttgctgaaaagcctgaaaaattcaatggggttgatttcaagcgttggcaacagaaaatgttgttctatttgacaaccctatgtttggaacgttttctcaaggaagacgctccgaagttgaaagaaggagacgaacatgataaagagaaggttgttgcggttgatgcatggaaacactctgatttcctatgcagaaactacatcctcaatggtctagacaattccttgtataatgtgtatagcactttgaaaaccagtaaggaattgtgggatagtctagacaagaaatacaaaacagaagatgctggcttgaagaaatttattgttggtaaatttctggacttcaagatggaagactcaaagaatgtgatgagtcaagtggaggaccttcaagtgttagtgcatgaaattcatgctgaggggatgaccctgagcgaatcatttcaggttgctgcggttattgaaaaattaccaccatcctggaaggatttcaagaattatctcaagcataagcgcaaggagatgacacttgaagatctgataataagattgaggatagaagcagacaacaaagttgctgaaaagaaatttggcaacaatcctatggtctctagggctaatgttgttgaagagggatcaaagtccaagaaacggaaatattccgatattggaaatgctaaacaaggcaaaggtaaaggcaaaaagttcaaaggcaattgctacaattgcggtaatcctggccatcgtgcaaaggattgcaaaaagtcacagaaatccaaaaagaagactactcaagccaacttggttgataccgcttgtggagaaattgaaaatctcaacttaacagcggtggtgttggagtgtaaccttgtaggggacactaaagagtggtgggtggataccggtgccactaggcatgtctgttcatccaagtggatgttttcctcctatacccctgtgaagaatgatgagaaactttatatgggtaactcttcttcttcaaaagtggaaggtattggaaaggtggctttaaagatgacttctggcaaggttgtgacacttaatgatgtgcttcatgtgcctgaaatttgcaagaacttagtgtctggatcccttctgagcaagaatggatttaaacttgtatttgtttctgataagtttgtacttactaagaatgatgtgtatgtaggaaaaggataccttagtgagggcctttttaagatgaatgtaatgactgtaaacagtgatggtgttaataataatgttacttctgtttacttgcttgagtcttctaatttatggcatcaaagattaggacatgttaattttaaatcaattaaaagtttggttaatttagatttattgcctaaagttgaatgttctaatattaaatgtcaagtatgtgttgaatcaaagatttcaaaattacctttttcttctgttgatagatcaactgaattgttagatttaatacatactgatatatgtgatatgaaatctgtaccatctaggggtaataaaaaatattttattacttttattgatgattgcagtagatattgttatgtctatttacttaatagtaaggatgaagcacttgtggcttttagacaatataaaaatgaagttgaaaatcaacttaacaagaaaattaaggctataaggagcgatcgtggggagaatatgatggccccttcgacgaattctgtatagaatctggggttatacatcagacgactgctccttatgcaccgcaatcaaatgggattgcagaaaggaaaaatcggacattaaaagaaatgatgaatgctatgttaatcacgtccggtttaccatagaacttgtggggggaagccattttgacggcgaactatattattaatagagttcctcataagaagacaaagagcataccatacgaagtatggaaaggaaagcaaccttccttgaaatacttgaaagtgtgggggtgcttggctaaggtcacggttcctaaacccaaaaggttgaagatcggacctaaaaccgtggattgtgtattcattggttatgcacttaatagtagtgctagtcgatttttggtttataaatccgatgtctcagatatacatgttaatacgattattgaatcaagggacgctaggttctttgaggatatatttccgtataaaaaggtatatgaaccaagcggcaatgacaatgataatgttgtgagacctcaagagactacaactagtgttaatcctgtagaggaagaacctagacgtagtaagaggcaaaggactaccacatcctttggacctgattttctaacatatctgttagaaaatgagcctcagacgtataaagaagctgtaacgtccccagaggcaccattctgggaagaggctatcaatagtgaaattgaatccatcttgtcaaatcacacgtgggaattggcagaccttcctcctggcactaagcctctaggaagtaagtgggtcttcaaaaggaagatgaaggaagatggcactattgataaatataaagctaggctagtagtcaaaggctataagcaacgcgaaggtctcgactacttcgatacctattcacctgttacaaggattacatccattaggatgttagtcgcgctagcagcgttgtatgggttagaattacatcaaatggatgttaagacaactttcttaaatggagacctagaagaagagatctatttagaacaacctgaagggttttctgttccaggacaagaacggaaagtgtgtcgtttaattaaatccctttacgggttaaagcaagctccaaaacaatggcatgcaaagtttgataaagttatgttatcgaacggttttagtattaatgaatgtgacaagtgtgtctacattcaatatactgataaagggtttgccatagtttgtctttatgtagacgacatgttgataatgggtagtaataatcaaatgattaaaaccactaagcaattgcttgccagcaaatttgacatgaaagatttgggaagagcagatgttattttgggtatcaaaatccatagaacatcaagaggtttggctctatcacaggctcactatattgctaaaattcttgaaaaattcaagagtttaaatataactcctgtgaataatcccatagactctagtcttcgactatcaaagaatactggcaaagctatagcacaaaaggaatatgctcaagtattaggcagtcttatgtatgttatgaattgcactagacctgatattgcttatgcagtgagcatgttgagtcgctttacgagtaatccaaacatgtatcattggaaagctatgataagagttttaggatacctaaagcacactcaaaactttggtttgcattatgaacagtatcctgcagttattgaaggatattgtgatgcaaattggatcaccggttctaatgatactaaatctacaagcagatatgtgttcacccttggtgggggtgctgtatcttggaaatcgtccaagcagacttgcattgcaagatcaactatggaagcagaatttatcgctttagataaagccggtgagaaagcagaatggcttcgtaattttgtcgaagatgttcccaattggccaaaaccagtaccagctgtaggcatacattgtgatagccaagctgccattggtagggctaagaacatcatgtataacggaaagtctagacatatacgtcgtagacatgataccgttagacaactactctcgaatggaatcatctcaatagactatgtgaggtctaaagagaacatagcggatccattaactaaagggattcctagagagttagttgaaaatttgtcgaaaggaatgggtctaaggcctatcaattgttgatcatcgcggtaactctaccttgatgagtggagatcccacgaactaggttcaaagagacaactaagtcatgatcgactgttaaacactgtggagttttaaactcatactcattcctatgacaatacagtgtatatgagggtaagcataatggcttttaatggtttcttaatctgatgtgttcagatgatatatgtggaggtatatcacaagaaatcacctatgtgagtgtgaagtgagggccgcttcaatgagaacttaaaaaggccgattctctacaacacttgcagaaccaggaaggtgtccacggccaaaatggacacaacaatgaggacgagcaatgctagagaagcaattgtgtgactcctattgtctcggtatacaccatacaggttgacggttcaaggcatcacgaccaccgattggcctagtatacccgataggtttacactagagaaggttcaaaggtaacccctacctatctcgatgcaattgtttctcgccgaggaaccacacttgcatacatattcatatgcatttagtcatgttgaattgatctcttattcatgtgggggattgttggagtttttgtttaaactctatgagttatgaataagaggcggttaacaattcaaaatagtaactacttataaccgctcttgggaaaggttagaaaaataactactcacaaccgctccgataaccaacggttacgatggtttatcgccaagagtcgcgatggttcatcgccaagagtcgcgatggtttactgacaactcttcaccagggttgtttgttgtctataaatagacacagagacagtcagaaaaaaggaaggagaaaggaaggaagtagaaaactgatagttaacttttctgatagtctcgcttagacactagtgcatttcatatcacataactctgtggttcctcaagcattgtctttgttcgtttgggctgttgatttgaagtgccatcaatcttcagacgtgatccgttctatcctgggagacaattgttcattaacctttggcatcaattggagggaacaaattgtcttaaggagacaacattgttgggctcggatcctttcatctctttgcatctgtttctgattcatacttatcatacaggttctatttaaattgtttttgtacagttgtagtagattatgttgttcctcttgactactcagattctgacccttgtgcaattggatatattccaattctaaattaactaatagttccaacactgtggagtaatactttatataatgctggtaggagaattgccatttgaggacaaagaggataccaaaatctccacaaaaccataaaggtaatttgctttatttttttaatttaatttttatatactatcagtataaaagtttttagaccgtcaagtgtcaatcaatcagaaattatcttaagtatgacttaagataatcattatagaagtgaacaaatttatgtgaaatctctaatctctttacactatttagtacatatgctattttactttttatttttgaactagctctgttgatagattcatcaatcatcatgtcttatatgtactctttctgactccctatgtgtgtgtgtgtatatatatattatccagagagttatagctgttcaatacaagttccctgacaaagtttgcatatctcaagacagtaaaaatctgatatcccgcatttttgtggcaaatccagcaatggtatgtatatgaacatagtcatttaattattttttggagggaacattataaaataaaaacacttataactgtagcatgatattacttggtgtatgttgttgtaactctgccttataattatgttgtagagaatcaccgtgaaggaaataaagtcactacatccatggtttttaaagaacttgcctatggaattgagagaagcggctcaagatgtttactacagtggagaaaatacaaaatatcctcttaaaaatatagaagagatcatgaacattgtcaacgaggccaaaactacacctgcaacttccagtccaaatctataagagagattgattggggaatggaagaaatgataatgccgaggtacatgaaatcatttatgagaagcgagtcaaggaagcaccaaccatattcaattttttggataataaattagattttttgttcacttttccccctaacttaaggtaaatgttttgcctgtatctatgtatcaaattttagttttatgacataaagttgaactgtacatttttgttgatatggtacaaggtttgtagttgtgagctgtgacagcattattgtgatttataagtaagaggtcttcgttttctccctctgaatatgatgttatgttcagtcttcaaagcaatgagctatgataggaatagatgacacattgttgaattgtataatttaaatttcaaattatcgttaggatttgttaggttgttatagtttgttcagtttgttattatcctgtattattagcattttgttgaatttctctctcttatataagtacctcatgttgagggaaaatatagaagagaatggagtgaatgaatgaatgaatgaaagaggaattattattccgatttatgcatatctgatttttaacatggtatcagagtcatggttcccttcatgaatgagagccatggtatcctccatgaaaaaaatcatgtgttatcttccatgaaaaaaaaaaattttcgctaccttattttttagagtctgtcttcttcacattcccattgctaatcaaagtcatttccggaagagtgtctgaagaaacaattggcaagttgggcatgactgatattcatgcaccaacttgagggggagtgttgcattgtataatttaaatttcaaattattattaggatttgttaggttgttatagtttgttcagtttgttattatcccgtattattaatattttgttgaatttctctctcttatataagaacctcatgtttgagggaaatatagaagaaaatggagtgaatgaatgaatgaaagaagaattattattccgatttatgcatacttcattttaacacacattaacacatcacttgcctctatcttgcacagtgatttagggtcaggttgttatctttacatttatttggccttttcttggtttttgatttctttgagaagaaaactatataggggtctaattactagttgtggatgcaagtattatgattgttctgttaccattttagaaagaaatctttcatgaaagaaaatagaatgaagtaaagtcaaacgaaagaatttcattttttttcttttattttatcacaaaatcttcaaataataaaataacaatttaattatatttcctggtgcattttctcattttcttcaatttcttccatcattaaatatccaaacatagcctttaatgcttgtttgacatctaaaatgcaccattataattataatttcagaacaatttcatgaaattacaaaataactaaattgaattactttcaatttttaatcaacaccttaaaaattgttcattgcatgtctcagaaatagtagaggtggataaaggttcgagcaataacctgacttgattttttatttttttttgggaaatctgacttgacttaaagcttgaaggatagatgaggtagggtaaaaaataataaaactcgtttagtttcagtcaatatttaaacctttccaatgaatattttaaaacctttatttttatgcaactacaccctattcagactaaacattaaaattcccaaaaatcaacctgatcctaacctgcctactttaatttaattggtttggaacaaaatgttcagtctgaccttgcttttgtcccccgaattacttctcaggttcatgcatatttctccatgttagatagcattgctagtccaactatagtactatacctatgtgttcatcattcttaccatatatcaatgtaatttagtcacacattaattctctttttcatggaagctgtaaattgtaattacatacatggtcaagattaatctcaattcacggcaagaaataaaaggaaacataaaaaaacacaagggaggtggtggtacgctatgttaggacatttgaaacgtcaacttcctttggcacatacaatgtattttcacgaaaagtaatcactaatgctcctatttttacaacgcaaatgaagcactttttcacaaattttcaatggagctgccacggacgagactttgatagtgacccttattgataaagacaagcgtattatttacaaatgaatattggagtcgacattaggggattatgcttggatctctttgtgataactgattagagaatatgtcatatctattctttcatgcttatatttgtttttgttatctttaatccaaggtaatcatcatactcctatttttttataacttcttttttatttatcattaagttcattattatcaaattcaattaatttaagttaaagatattattaatgttgatctttaattcaaaattcttttgagtcatttatgcaatttttaaatattatattttttatgaatttttaaatattataattaaaccttcggttattagctttctaaattcgaatttcagcaagaagaaaaaataaaataaaaaaatcactctgcaattgagagttcgagagttctttttgcttcatgcaagtaataattgggaaaagattaactataatcgcgcaacaaaatctttgcctgctaattgttgatatatatataggtgggattcgactttaagcattgcagactctatactagatatttttaacttcgttgtttaacgagttatttatttttagatgttattactttttattattattggggatgatctacttattatattatattagattacttaaaattaagctaagatagtttatgagtaaaaaatattttcttgttatttagagattctttaaggaaataattttagaattgcttaaaattatataattggagtaaaatatgaattgtttattaactatgatgtgatattataagaataaattaatataaagtaaagaatttaaaatgaattatttaaattatatcgattaaagatgttgaaagtaaactatttgacgcactcgaacggaattgaaagccaagctaattaatatcctaatcttgaggctaaaatactaaactgtcttcattcgttgttgttttatacgagttaatttacttttctgtttggatttccagcattatattactaaagtttgattacgagaaaaaaaaattatggcctttaaaaagaggaggttattaaaggtgggcaattattaaaaaatcaataaatatatagtatttgtaatgtaaaagttttgactatatcatttagtgcatatttggttagaggttactattggttgtcttccgtaattttggagaagcatccctttattatttctatgctaaagtgcattggtattcccactatttaggttttaataggaatctaaacatattcttaattattgattgttatgcattataagattattaactcttataatcttataatattacctctagactaaaatataagaaaaaaataatatatgctagaaataaaactatcttaattataaataaaaaattaaagaaaattctaacaaatttatcagtgcattaatattaaaacgtgatttttttccaaaattataatcatttatctacttttttccatttcattaaaactacaattttttcttttttttatcatagcattcatcatatatatgttactttatttttctacctttcctcctttcttccaatttttctctatctactcccaattcattccatattaggatggataactattcttttcattaaggttaaatttgacaaatattttagttagtttttaatttttttactagctaaaaaactgttgattgtcgatgaacaaacttattttaataacttcttaatagattctaatatttcttgaaatgtcacttaagtaatattttttaaaatgctagtttctaatttttattttttatatttttttcatttttatcctcaataatatattaaattttcttataccttttttaaataaattatgatttcattatttttatgttattttacatgttttagctatttcaacaactaattttaaacttagttaaactaacttttcaactaattttgtcaaatataattaagatgtatgtatttttgggaagttacaaacttgcctcggtgataaaagaagagaggaaaatataatttattcaatttcttttattaaaaaaaactaacaattaatatttttcataaaagttgatatttgcatttttattccctaaagtaaacctacactttaaaaaaggtaaatgtagagaagaaattcctttcattccccgaccgttcaccttaaacatgataaatgctatgagtactagatttcccccgccgaacgttattaaactaaattagcactaggccatccttactttaaagtaaggaaattaattgaaaaacagtagaaaattagatatccaaaaaggaggtgaaaagagattgtcaaacaaggtgaaaaggaaagtttgctatttcattaaaatataaatttgttgtctaaggttctccctttgtccagtgagcagacagcacaatcctattttctatgttataaatcattatcatatctactttcttcttttcccagacaatcaatttaactttaacagaggaagatctgttcttgttgttgagttatcaaccacccttgggactagaaagctttatttgaaaggtagatttcacatagtacttcatatttttcggctttatatggctgtcattcttggagaaagtttttctcttttgtgtcttatgtcttaaccatgtctgcagataccgttaacctttgcagaaaggctagattattttccctacataattctgtttctcttctttacaagctaaaaacgacccatttaaagacaataatacaatatagcaacacgtttatttgagtcatgatctttaaaaatgaaatctaacaaacagaaatttctttaacctgcagaatagcatgtatattcgggtaactgggtttttacaaggagtgaatggtttgagtacatgaacgtgcggtgcactatggtttattggtccaaaatttacttacatttaattgatttttattgataaaatctgcattatgatagaatgcaagtgagagtaaaaagtctcatattggttagaacaacatataaatgacaaaaatatatatactgatgcttaaggttttaagtaaataaatgttaagtattcaattatctgtaattgactcatgattcattaacaaaatttcttcaatatttatctccttgtattccgtaacatattctttttatatatctaatgtaaaatacagatgaatctgttcaaaatattgaatatttcaggatataaaatttgtattcaatattggatattgagtggaaattctcccacacaaagatagtagaagcatattgatctctaattattcttgacaaaagattctacttgactccattgataaagaaaaagcatcatttttattatcaaatatcatctagtcttttgaattctatttttttttttatttctttcccatgtacctaatacaggaaaagaatactactactctgtctagaaagacgtttctcttattacttgaaggcattggcattttaaaattctggtttctcatgtatgacgagagtaatgttgctttacttcaaagcaagcatcacattctcttttgcaatttttttttctcttttctttgcttttcattggaaaagcttcttcaaggcctcaacaccatcaactcagcaaataaagaaaaaagggaagaccagaaaaaatttatgacattgcttgcatttttcaacataatttttcctttttattttcccttaaagagcttcattttgctctcaagtattttccacatttgctatggcttcactaaaccaaattatatacatctacttatgactacacatattcaacaacttcttccttccttccacaatttcatcaaagaaatcatcaagttgccctgttatagtctcaaccccacatctcaacaacccaaagcaacgtttcaagttgtcaacttttgcttggatctcatattgtgcatcataacccaccattctctccaactccactttcaattcctccatggcaatcttggcttgtttgaattcaagaagcagaatccctggctggacattattctggtcaatctcttgtgcaactttctgctgcaatcttgccatagaagccataaaacctgagccataaaccacgtgctccacgtgcccctcatacccttgttggtcaaagcatgaggaagaccaacaatatgcaaccccacatagcaaaatcatcagaagcaatgagctaaccctcatcattgcacaaagaacacctcggaagccattgaactcgtttaactttgatttcatacacatgttctgatttagacattgagacaatgcctgaattctattttccatcaagcttttattttcctctaccaatcctagactctccctttgacaaatatttatggccctaataacctgcaatatatgttttctagaagaatttagtgcatgtttggaaactcataaaaaaaacaaaaaaaatcacatcaatttagcttaatgaaagctataactattagcttctgattaaacatgaaaaatcacatctgaaacgtgcaatcaaaacatgctattagagtcattaattaaataaagttgatttagttttgtaaaagcactaagcttttgactaaaaagtaattttgaacagaatttgaggtgtatatatactatataccaacctgatgtgaaaactctggagtcaaatgatggtagccatccactgaggaagctatgttggagccagttaaggaatagttctctattccagaaatggctgatttgagtacatggcagatatcccaaagccttgagctttcatccatgtattcattcagccattttcctccaactgacaagcaaagcctttggaccaaaatggttaactgggaatggaaggattggagggatgagaagacctctgaaatgaattggattgacatgaagtcatgggagggaaggattggtgaagctcattgagtccttgagtgaggaagatgtagaagccattgacagaagagtttgtgcatgaagaactactcatcatgaaaggttgaagggaagttgatggagattgatagatttatataattggaagattaagttgaaaagagattaagcaatcaagaaagtgggtagcttagaggattctaacttcttttttatggtatggtgaaagttactattgggtgtaattatggctgtttcctatagagtggagtggattttttttttttttttctttccaatttacactatttatcttcaaataattctcaatttacattacttttaatttaattctcgaaatacactatttttgagaagtcatgttttcaggacttgacttcccatctaagtttttttttttggtaaatgttattttattaaatttaatttaaaataataattttgttatattatttaatttaaaaatgataatattttttggtttaataattattagtaatcttaaataattaattaatagtgttaaaataaataaaaagaacaaagtgattaaaaaatagattgattaaaaaatagtgaatatatacttatcaaatctcaattatattatataaaaaattaaaatactcaaataacaaaaaatactaacaattagagagataaacataataaatgaacataataaaacaaaataactaaatgtactaagaataaaaatgaaacacgaaaatgacgatactaatcatagtttgaaagatattatgcatcagacatgtttcttccatttgaatcattctagcaagttgtttattatgcacaacatctgcataggttattgcaacatgttgatcgataattgaggctggtttggttactagtttgctaaaaataactaaaatttatattggacaaaacacttctggtagttggattccggcaacatctttaacacgtcttcatcatcattctattatttcatattcgatttttttaatattttgtatggcctaactgtcgaaagaacaattttctaaccacatgtgattggtgacttccataaggggaatctctaggcacaacttgcttgatgacatccttaagtttttgatgttgcatattgaaggaattttaaatcttttggtttgtttcagtgaaggagtaacccaaaaaataccttgtcgtggtatcttgcacttgctattgtattacaacattgcatcatgagtaggaactagtgatggtgaatcgaagtaggttgagtatagtatcgggtgttctattgatgatacataataattctataaggtcaacaagcaggtattgcttattacacattaacattggggatatttgtgcgaataagtcaagtgtagctgaacgacttgattaattgtacaaaaaatattgggtaaccagtatccttggttaattccatgttcaaaggcacaaaaatatttgtctgtgtcattgtttgttgaggagacgtattttaagaccacaaaactttttgttattagaggtcgacaaatccaaacaatgatcaactccggctcgtagtattccaaagtcgtctctaaggcaataaatagcggtcaacatgaatcaaatacgcacattgttaacaaattgacaaacacaacaacacatttattgtaacagagactcaagtcccacttgaaactcctatatcacctggaaagtttagggttatgttataatcctagaattgcgaaagtggcgaatttcagactaagcacttatcgtgttttcatataatgaatgcctataaatctgttaatgttgatcccataaactatgtgccgctatttactttacaaaacatattgcaccgtctacgataactcctttggtttactgtcacacgaattaatatgacaagaatatgaaggagatcaatgggtcatgatccaaggaaaaggaagagtgcaaaggtagttcagtttcaaattacattcccactgaaaatggatgaagaaattgaacaagatataaaaaaaatgtgaaatatatcaacaataatgtcataattgaaaaagttgttattattgttcatgtattttatttatgatgtattatggataaatataaaatattaaactaaaaatattatcatattctaaaattaaataatataaaaaattaattaaatttaacaaaataacattaaacaaaactcaataaagaagttgggttaagcgaaggtggagaatcggatctgaaaacagaaatttttaaaggatagtatagttcagaaattaaattaagaagtaatgtagattgtgaattattaggagataagtaatatagattgataaaaaacctggagaggatgattgggaatctgctgcaattactttttattcctattgaacaaacaaatgtcaagagagagaaagaggcaaataatcttaagaatatatagtactgtggatcatatgtagagcattaaaaaaatatgcattatgaaaactatataaatagttccccccgaccccaatttctcgtacttgatggtttttctatttcttttgttattccatcgaatcgaggtttcagtatgagattggattctgctacttgttggagtataaaagattgactactttggcttaagattctgcttctcattcttctatttggatttggctcgctagctgttgcatttaaagtgcttcccttcggcttcttttctattttttattttctctttcttctcggcccatgttttaacctcttctacacgagcacactgcaccttttcgttttggtattcttaaaaaacgtggtacgtcgtccattttggtttttctcatcctgtagagaagaataagaatgaatatatcaactgtgatcctcaaattaaactcaaaactattgcggcttttttttttccttttcatattcactacaaacaaatgtctaatgtcatatactaataaaaaatattgatcgttaagcttattcccattaatatattttttagttaattaaaattaaattgttaatcaacttaataaataaatatataccacagtagttttttttattcagtgaaaacaagaacggaacaaaccatcacttacgaataccaacaatgcctaactcatcccctaaaagaagggattaaagacctcaattggaagactataaccgcagtataatacaactatacacccataatataaggtctatatttaattttattttctgataaatggatattatattaatggaggtaagttaataactttgtctttgttaatatatgtaatgtttttgtaatgactataatgttcacattatgttcttgctattgacgttcacactttgaataacaatttaaggttgacttcaatttttctgactgagtttttgttgtgtagatttattttcaccaaatcattgcacacattaagaatagccatttgaaaggctaagttttaacgaaaggataatgcaccaaagcataatcaaactaatctatctgaaaggacaacacttatatatatattgctttttcccacagtttatctgattttaagggtgcaggaaaccaaatcaaatattcatagatattagtcatgtattaagaaaatttctcacttataatcactttttccttgagagtattcaagtatattagtgatgttatttctgatattgactcatcgtcgtcctaggtgtgtggctagttctacgtataattgattcgatttgacacataaattaagaccatattcattttatttagatgatctataacaacattcctatgtagatttgtttttgttggtgtccacacaattgacttgtctagatcttatacatgatttcttttatttgacattgtgaagtctgttgcaaggtatttattattcttgtaattgtcactttccatagttcatgagcacatcatatatacccaaaattgcaaaattagatacacgcgttttcgatagtaagataacctttttattatacaagtgagaatgataaatatttactattaaatcttattataagttatcaagatcaaaatatataaatcacgtgagttcttttttataaaaaaaatcatgatttttaaattttttacataacatcaaatcttaatcattataattgtataattccgatttactgttcttctcacttttatataaacatgactttctcactagatatgttcctatacagtcaacattcatttatatttttaaaagtatacatacactaaattaatataacgaagtatcagataatttttaaatgatattaaaatttatagatttgacctattgaataagaatttttaatttaatgattgaattaataatgtttaatatgtacaatatttattaaaattactcttacagtaagttgaaaaagttgactttttatactatgaataaacaataatcaatttttggttattcttcaagagattatattgtttcattatgaatgctacagttatattgggtctgttttcatctgatcataatttctttattaataaaattatgaatataaattaaagtattttaacagtgcgaaagtatagaaaaaggaatgggtgaatgaatagtagaaataaaaactatttttatgaaaaaattgcacaaattaagtccatgagcacaagattgtttgagcatgaatgaaaaagaattcgaaaggattatgacatatagacagatacacaagtcacagaaagaaaagatttagttcgcaataaaagattatgaaagctaattactagatatcagttagctaataacaaaatagtcttgggttgatcagaatgctctgcttcaattataggtagtataccaagttaattttgaaacattgttaacgtagaagttcactttattatccaaatatattgtcttgttacttaacgtgtttgacaatacataaaaatattaaatccatttaagtaatataatagcgtattaatgtgaaaacttttcatcgatattcaagttaaattataatacaattatagatagaatcttattatgaatatttattatgaatatcataagataacataaaaaaagttatgaataacccaattttacatattctaataaaaatcttttatttaatcaatgctatttaatcaagaacactaattagcatttgccttatacataatatgatgtggttatatgataataattgactttcgtcaaaaattggctggataagagaggttgacaaattcctgtaggtgcataactgtataaatagaaatcatagacaattgtttatagaaaaatgctacatagctatacaaatgataaaataaaaccatagaaatttagcaaaattcagtcaaaatttatcaagagtcgcggttaattattagacataaaagcaggaaaaatacattcctgtaagaattagggtgctgaaagcacaaattcagtcaaaagtaacatgtttcttatattccagtctttaccagcaattcagcaccacaatgtgaaacacatataatcaaaaaaatgttgatgctgtaagcaacttgtaacaagttaacactatcactgtaatatttgacattccaaatccagcattcttcccattgaattaaacaattatcctgagaaaaaaaggtgaggttgattgctgtatataacattaatgaatttagatggcctaataggttactatgtccacagtcatcaaattgaaggtacgattcaaattcactaaagtttcttctaatcagatctcctttgagaccttggaattggcactgtttggatggaaagaagtcatgatgctacatggtgacaaattgctgcaaggatcatagatttcttgaataaatttcaacttgcacaacatctgtcccttgttcataactcggccctggattccgtgtcctcatttgatgaatcttcactattgaagtccttggattgattagggggttgtattgattctgattcttgatcatcgcccaagatttgtgctgtgaatcttcttgcctcaaaatccaggtctggccactcagaaactattcgtctagcaccctaatgttccgagataaagtagtaaaaaaatggacatagaagacagaggagtgcaaaaacataagttgtgataggaaacaagtttccatgaacacaacttaaaacagcaaaacatttacctgcagtttgggttcttttgtcatgggattgttgcacagatcaatggtttttgccttgtattttgtagcattaccacaccatgattcacaccatagccattcttgcggcaaagagaaaataggcacggtatgctgagcgtaattaggaagatcctagaccatttcagggcaaattttagcaaaaaggcacctcaaaccaaaaacaaaagcatgcattcaaaagagagaagaaggctacattggaagtacataaagattaatcttcataataaataatatgaaatatactacgaaactagtaacttgattttacagtcctaagtatccaattttagcccttcatacaatttatgaaattgactctttcaaattctgaaatattttttcaaatttcaaatggtaagaaggaaagacctgattccaacttgcacaaaaatgatattgattcaacactaaggtagtgtttggaccagcttattttgcctttttttctccttaaaagctgggccaaacactcatatatatatatatatataaaagtccttaaaattataagtagcttatttttaagactaaaagatgaaaataaggagcttattaagaagctccttggagtagctttttatagcttgtgcggagcttttctagcaacaaccatccttcgaatcccatctaccggcctttcatgtatttccttttctaaaataaattcatttcctcctttcttatatgtgcgtgcccctgcagcttttctgtggaataatgatgctgctttttttattcttcccataacattgaaatccttatgcttaacaatatatttttgttgttgagaaagtttctataagttgtactttcgtttgcaaattatcactgaaataaaattatattaattgaagtaatttcaaatttttaatatatttattttaatattttaatttacttttattatcattaaaatgatttaatatgaattaaattaatttaacacaatatttttttgttttataaatatactttgataattagtttcaaataaattaccatacaacttttaacttaaaaagagcttttagttagaaaagataaaaacttccaaacaacttttaccttttctttaaagttcttaatttagctttaacttgaaagtaacttttaagaaaaaaaaaaaaaaaaaaaaagccgccaaacataccataagccttgccaacaaggacatgctgtacatgagcagtctttaccagtaaattttttacgacagtgatcacacaatgtttccaacaaatacggaaataccatcttgatcaatgggtataaacatactgaaataatcaaattaaaaagtttctattctctaaataaattatacaacctgttataaatttataatatgatcactcatcaatagtcaccaaagacagattcaaagagcatatcataaagttgctccctagttttcctttcatttttggttaacggattgaagaggttacatattctttaagaattcactttgataaggcatatacatcaaaagttaaaacaactattctttggcccttgtttaacagcatactgttttaggttaaccgttttgtttagagcagtgttactaatcctaagtttgttggtcatgggttcaactccagaaacagcctctttgcatatgcaagataaggttaggtacaatatccttcccccttacctgtgcatagcgtgaaacctctgggtaatgggatacgtagtagtgttactaatcgtaagtggattagagatggttccttatgcctccatcttatgaagttgttggaaagtttccttaattgcggtcatccctacgccaaaaagggctacctaagaccagaaaggctgagtttaacatggtagagtgcagccactaggatgcggctcttaggggattgagatccccattgattagagataaggcctaagtagtgcttataaggcttgggtaatcctcaccttgcaagcaagttttatggggttgagttatgccttaaatccaaattctaagagaaatgttggagataccacatcaactagtgataaggccaaagtaatgtatataagtgggggacaaccctcaccttacaagccccggtcttgtgggttgagttaggcccaaacctaaattgttaaatgctattgagtgtatcctagagattatagttaggcctacctagccatctagtccttggtgaggggtgtgtattggagatcccattgtgggattaagttaggtccaaacccaaattgtgtcccaattctatgggaggattttaggagatacttacgtctttcacttagacaaaaatgatgagtcgggtattgatactcatgaccattataattgttataaagcctctctcccatagaaatatcactagttattggagttagttagacttagctgctttgtattaaaatctataactaagggggtgtatacaagttgatttgattttttctcaataatacaatttcctctatgatttctctatctttaaactctctcaaatctaacaagtagcaaccaaagaaaaccttgcatttaccatcaacattgtatctcacacatccacacttctgcttcttcctaccttcctgtgtacgattgttaatgccactgataaagtgagcgacgtttccacgtttatcagctcagataacaagactttgagaactttctcccaaaagaagaattgatttcttcgggatttggagggagttctggtgatggtaatgacaagcatccttctcaggatgctaagtgtcggaaaaattcacgacctctgatattacataagaaacagaggagattgttaccatttgttcctacaaaagatcctgcccagaccttgcttctgctttaacagcattaaatatggaattcagtgatcacctcaaatgcttgcctggaaaggctcctagatctgtgaatcaagccacactaaaaaacggtggcatgaagattctttccaaggaagacatggagaccatagaacactgcattgctatgtctaaaagaggtgaattccctccctttatggttgtttatgattcgtgtgaaagttatactgttgaggctgatgacctaatcaaggatatgacaattattgctgaatacattggcgatgtggattaccttgacaaccaggaacgtgatgattgtgacagtattatgtccattcttagagcagaaagttctcaaagtgttgttagctgtgctgataaacgtggaaacatcactcatcgctccctttatgagtggcataaacaatcatacacgggaaggtaggaagaagcagaactgtaaatgtgtgagatacaatgttgatggtgaatgcaaggttttttttttgtggttgctactcacgacatttctaagggagagaggctttattatgatcattcaaggtgacagttttaataggcacaacatgatggaggatgcactcttcttatgctggtcttggcttagaaatttagaggacggtttcactctcccttttcacttttggtctactagtatgggagaggcttttgtaactaggggaggatagaaatgagatgttttttgtatgtagacctagttttgatagcagaactcaggggcttttatcatgcttcaatggttcaagcttccttagttctgttatgttattctagggtattgatatgcagtacttcttgtaatgcagacaattcttttgatatatatatatatatatatatatatatatatatatatatacacacacactttattttgctggccaaaaaaaattatgatcataatggtcatgagtatcaatacccgactcatcgttttgtctgagtgaaagacaaatacctcctaaaatcttcctatagaattgggacacaatttagatccttgagaaaggagtctatttatattcttgaaaatttcaactcattgttgttgcatattccacaagttttgatataaagcagtcatttataatgcactgggttttcatgttatattgggactacaaaaaccagtcaaacttgcttaacaacacgctcttttaagtaaggattcatttgcaggtaaaggaactattaacttaaacctcttacctgatccaagttggctagactatttggatccctgcttagtgtttcataaataactctaagattatctccagctgcagtctctcggaacttcttcagatcaacaacatataaagcactgaaaaccgaaattgaaacagtaagcattgaaattatatttggcaatagaatataaaagtagctactaacctaatatggtatggtttcccccgcaaatgatcactccagaaaccctatgacacagggaaaaaaggttaacaaatatttatagccaatactgcattaaaattacacgggcgtaacgaacaccaagagtatcatatagattggaattgaacaataattagaatttcgacagtgacatttacttgtctccaaaacctatatccatccatctccttattattatcgcaaaatggggtatatgccaggggttttcctcttatatccatgtcatagagtactcccatgtctgccctaacaacttgatcagcatccacaaaaatgacctgcatatattggtagattttagacagatttcttgtaagggattttgattcttcattatctttgtcataacattgttattgggaaaaacccaagtcccacattggctagagataaacccaagatagaataacaagtgagaggcaacctcaccctatgagctagttttggggttgagttaggctcaaaccaacatcctaagaattgtgtagtgtgacattgaaattaattgtacaaaagacaaaaaccaaaagtatggaacttgatgcagaagaagaaaccatgataccttctccaaagaaagggggaaaatgacatctaggaataagattttatatgcccaaattattcgctgcttttctttctgcttatgcaaccatgtgggccacttgtacgtgactagttcatatttaaaaccatattctagggccatgtgtggaattaagtcctgtatgttaagtcaaccaaaatggttcaggatgtcaggcaaactcatcattctactttacattccaatatacaaatgaattaaaatgtaagcatatataatttgggtggatatataaccttaaaaggaggagagaggtagttctttatgaaccagaatttaactggacgatgagtattctttagaacacttagaatcataatcttcataaagcgttcatatctggaaattgacaagaagcacaaagtgaagattgcatccctgatgacaaataaaataccaccaggctccaactaaatatgaaaaaatattatagaatccaagtatggagtttaatagttaccatgcatttggaagtgtataacatttgtttgaaagattgtgcttagtaaaacttgcacaagaaattaacgtccataaatttcctattaattacaggcacttgaaactgaaattgtattctgaaatggaaccccaaatcccattccacgaaatctgaatcaacatacatgattgaccccattccatgaagaagcataaaacatcagtaaatgatattttctgctgtacaagacaatttttccaacatgatacgtcacatatagtaatcactgtttaaatttcgaaataaaggaccaaacttgaacaaacatatgttaaaaggcaaaactaaaaggaaagacagaaaggaaaattgtaacaacttataataaggaaccacttacaggtgcccagaagcaatagaaaagatattaatagtttttccatgccgtccaccccttcctttctcctatatgggaaaaaggttcaatctgttcaactttggaaatgatagtacaaagataaaaatggaaggacaaagcacagggtaaacacttaataaggttcaatctgttagggtgtgtttggatacgcgttgaaaccacgttgaacggagattttgtgcattccaatgtaaaaatgccaaatcattacatcaattaaagcttcaaagcctaaaagcaacatcaatctgataaaatcttttcatataacattaacttaagtaccaaaagctaataaggttttcaaggaaatataataaatgatgatttttgtaaaatagacaggtggaaaatgttaggaagtcttacatcgtctgccttaattctcggggtgcagcttatatatttgttgagcaactttacttagtgccaattggttttatttcagctgttgatgacattaattctgtcttccgagatgtatttgtgtcactggaacttgcttctaatttaatttcggttgggcaattggtggataataattgtaatgttaatttctcccagactagttttgtgcaggatcaggtgtcggggaaagtgatcaagaagggacctaaagtaggcagattgtttccatccagtttacttctcctatttttcctcattttcttgtactgctgtcccgtcctcattcaaggattggcataataaactaggacatccaaattcagttgttttgtctcatttaatagagaatggtctgttgggcaataaaactcttgtttctgactcatcctttagtgttcagtgtgcaaacttgccaaaagaaaaatctcccatttccccataatgctactcgtgctaacaaatgttttacaattatacacactgatgtgtggggtgtgtctcctgtcttgttgcattctaagtataaatactttgttatgtttattaatgactatagtcgttttacttggatttacttccttcgttctaaagatgaagtttttcctatgtttaagaatttttttgcttatattgagaaccagtttcagacaagcattaagattttgcgcactgactctggtggggagtacatgtctcatgcctttcaagaatacctacaacaaaaaggcatcctttctcagcgttcttgtccttgtacacctcagcaaaatggcattgcagaacgaaaaagtcaaaatttgcttgatgtctcacgctgattatttcttgcagcctctgtcccagccaattttgggttgaggctctgtcaacagctgtctttctgataaatcgttttccttcccaagttctcgagtttgattctcctttctttcgcctctttcaagttcatccggattatattgatcttcaaccctttggttgtatttgttttgtccacttccacctcctaaacgtcataagcttggggcccaatcagtcatgtgtgcgctcttaggttatagtatcactcacaaaggattcttgtgttatgttatgatgccacctctcgtcaatttcatttctctaggaaagtggttttctttgactattaaattttcttcccatgttttaagtcttcatctaatgatttgttaacctccctaatttttctgatatttctcattctatagaacgtttcaaaccaggtcatgcttatgttagatgtcagccttctttgtcccttttggctgctgatctgccacctgtgcctgctccactgcaacgctcgcctcaggtgtctcgtgcccctgataggtatgaatttgggcctatttctcttacagctactctatcaggcacatctgttcctacatgttattcacaagctattaaagatgcttattgggtcaaggcaatagatgaagaactcactgccctccaagaaaatttcacatgggacattgttcctcaaccccctagtgttaagcccattggttgcaaatgggtctattcagtgaagctgaattctgatggtactgttaatcgtttcaaggcttgattggttgcactaggtaacaaacagaaatacaggttggattatgatgagacgtttgcacccgttgcaaagacgacgtctattcgaactattctttctattgctgcctctcaggcatggtcactgactcaaatggatgtgaagaacacctttcttcatggtgatttggcaggggatatttacatgactcctcctccaggcctattttcctcgtctactggtgtgtgcaagctcaattgttctctctatggcttgtgacaagctcctcgagcatggtttgaaaagtttgactctactctcctttgattttcttttactcagagccggtatgactcctccttattcattcatcgcaaaaatattggtattgttcttatttatgtcaatgatatgaaattactggttatgatcatgccgccattcaacgtcttaagcagtaactcaaagcctcctttaatatgaaagatcttggttgccttaagtatttcttgggccttgaagtttatactgattctagaggtatctttcttcaccagcacaagtatacaaacgacttaatttctttggctggtcttgcttcagccactccaattgatactcctctagaggttaatgttaaatatcattgtgatgaaggagatcttttgtcggatcctttattatatcgtcagctggtgggtagtcttgattatttgacgattacattcctggacatttcatttgcagtccagcaggtgagccaatttatgcattccccatgtcatcttcatttggccgttgttcgccccatcattcgttaattaaaaggcacttcaactcgtggtttattttttcctactgggaagtctcctagtttggttggctacagtgatgcagattgggccggttgccctgatacacgaagatctgtcacaggttggcgcatgtttcttggtcctgcgctaatctcttggaagagtaaaaagcaatcacgtctatcgaagtcctccattggatcagagtatcgagctatgtcaatggcttgttctgaaatcatttggcttcgtggactcttagatgagataggcttccctcaaattgcagccacacctctctatgctgacaatactagtgccattcagatagctactaatccagtttttcatgagtgcacgaagcatattgacgttgattgccattctattcgagaagtattggacgctcatgttatatctcttcctcatgtcacgccacaacttcagcttgcggatatcctcaccaaggttgtacctcgtcctcgacatcagtttcttagcagcaaactgatgcttctagattagccgcatcaatttgaggggggatgtcaataagggattctgttattatgttgtttcttgtaatcagcaaatctgtctattcattgtatattattagctttcctgatttaggttgtataaattaggaaatagaattattgtgtcttaatggctgtaaatgcgtctttaatgacagtaaataaatctgtattatttatggatgaacagcagaatgaagggaaagcattcgagacagaaattctgacagaaaactaatggacaagtaaataaaagacatacttgcgaacttttttcagcctttttagataatttgttgccgccaatgaaaccagaagcccattttaagaagttggaattcaagccacttccctataaaaatatcatgaagatatctgttatggattgcactagctttagcctttaaataataatgtttatcattttatgcttcaaaacatgtttttaaagaacaatttttaatagaaagcactcactttcttctcatcttgtgcattgtcatcaggaagaagtaattcctcatgctccttgcccttttttttcactacttccatatgaaatactttaccccgtaaatcattaatagtaatgagttttgatgattgtttatcgtaacttccatcaccatcttcctttaaaatgtaaagctcggaacttcttccaggagcaagctgcaagtaccaaactccaggtgagactttcatttgccaatatcccaggttggccatcacaagggtatcaactaaatggggagtagtctttgtcccaaggatcagctgaagtccccgaggaggatcgtgatctttctcagaacagtgacctgattagatttcacaagagtgacaatagattagtacacagtgctcattaatgattgttaacatagaagagagacagaattaggaatataataattagagagattttaggaaaattgatagagcctctattagttggtttgggtatgtttagtgaagactggtagaaacaccaataaagatgtttaaccagatggaacatatttcattagttagaggtagaaggagaccaatcccatatttacagttaaacatatgacagtaatttatggcctcgtatgatccctttagccaatccacctagtgggaaaagctttgttgttgttgtgtttgtaattgtaagctaacaaggagaaaacagaagctaatgttatagacataactacacatattaaacatcctaattgcacagaagtgtttaatagaaatttaaccagtgacatgctgctggttcacaggctacaaatggctatattcattttcccttactgtgtaatgagcagagtaggttccccattttcttgttcttaaattgttctgcatctgtttcttcatgaaattgtttgtttcacatttcagtgttgggtgtgcctaggtccatggattagattttgttgactagctttaattgttatggtagaagtaaagaagccaaatttttatggtaatgtgcaatctatgctacactttgatgattatgcaggagcattatttttgtttttaagggatccctttggacaagcatattctttgggataagattaggcatttgaattgtagtagttgtagggacttttaaaagtggtgtcaattacaggaatgttaaggttgggaaactttgcttcatttttttgttgttgtcatttcttggctgttcttttttttttttttaaagagggcctctaaaagaaaaatttcttatataactttttttcttaaaaaagcgttaattatgctaatgaactagactactacacaaatagatgtggcctagcattctaacaagtagcaatgattatttaataatatcactaactaacagcttgtatttctaataaacaagatgcaatcttaccagtgaggacaagagcttcaagctcaaaaactgcttgcaatgtcctcgtgtcaccaaggttctcaagaagaatgttatccaggtcatggctgcagcatgagagatattactaaggactattaaaattcacaaaaagtagtcattacatataaaaactcagaaatgtattacatagacctccctcaaggcatggaaaaatcatatttatttcccccattcccgaaatatcaaagggaatgccttcgcttgacagaaaaatacaaagcattcagagtttataatttaattcaacaatttaagttgattatttatctaccagagttggtgtgtgtcactaattatgagattcattcaaatttagatgccaaaaactttattctttttaaatgttcaccccatttttacgctattaattcaaatttataacatgcttctttattaacaaagacaagggtacatttggactaacataaacattgacattagaatggtttaacgagtctaacagctacttaatggaataggttacggttactataaattttaaatgaggaagaccagtgtaatttattcacaataatttactcgtctccagttacattcaaacaaaaaattgataaaagaatcagtatattaacaaattctaaaataatacatacaatgcaataacgggctcaacaagccaagactcaggaacatcaagattcatggtgagagtcttagacaatggcatgtttgcaaagagtgcttgtgggccatttattgcagagtcagtgttgctaaaatcatcctgcaaaaatcagaaaccctgtgagacctagcatcaaatatcatgtctggaattatcttagagaattaagagttaaataaataagatataccattgttggtaccacatatctgtagtagctcttcagaggaagatcagcaagagaactctgtcataagatgaaaacagcattcaatacaaattagcaaatgtataaagaacttggcaacacattttgctggacgaaaattaaaagaaatatatcttgtagaaaatctcgcataaactatcactagaaatcaggagttcaatccttgttgctccattcttctaaataaaggctaaatttcgatacaagatagattgggccttcacattaatggatcttgcaagagggagtgcaatggatatcaaactaatcaagagccttcacctaaacagttaagcatttgggagagttggctcttggcaggttacaagctaaaaatatttagagtagaacagatgagggatagatgaattaactcctacaagcctattgatcataatgtgaatggactaatacatgcacatttggtttaagtgtaactattgcatcaaggagttcctttggataagcagctactttgggataagataagatcagacaattggttttacttggtgtaaagccgacatggttttttatactaagtttcatttacaactcagttgagggattggatagattttctttctttgttctctgttgtctgtatttcctttttattttaagaaggattttaacctcctgattctttgtaatcatatattctgtgtcaaaaataaaaggcctaaaaataaaaggcctaaacataagactgaataacagaaggccttatgaaagccaaattaggggaaattcacagttccacaacacaagggcaacactttggcttgtctcatccaatcacaatgagagagaaacaatttttttccatcttcttttttattccaaatgcctaaaaagaatcttattgaaggaacaatttcagttgcagaaaaaaaattattatataattatatatgtttgcagaacaataatagatttgaaccaaccactggattcagtacaattctcatgctgggctgaatgtatttccacaaaactcgaagaattccagacaacctctggctggttggacttaaaggatcaagaaccgcatcaatatgaatacttgaatttacattatttagaataatgacactgcacagataaatgatggaaaaagaaatactgacatcatataatacatataaatgagcaatccaaaaatgactaaatcataaggaaaaaaatgtttgagtgcattgtaactgataaaaataacctatgctgatcattcagaatctcaaaacgagcactttcagaattccgctcccgcatggccattgaagatgataaggccatgacaatatcactaatgaatttgctgcaaacaacataggcaacattaaagaattgttaaatattcagtaaacagaagtgattgaacaaaaaatctgtttaagttactataaatcagaggacttatgcacacccaacattctccaaaaatttcaagaactcaacaaatcagtagtagcagaaaaatgtaacaatagatgagcttgcacagcacataaacacatatgggagtttgctatttaaaagaaaagaaaatcataggcatattgaactgaaaccgtgtgtctgaatacaccatggatgagagtttatataggcttatagtattcattgcacataaatagaggatattcagtttcctataaatcagagattatatgcctataaactacaattattacaatgaattcagaaattatattctgattcccacatgcttatgtgacctatcacctatgcactttttaattctttaatttcttgtttctaaacttactttctattcaactgattcccatattcatttgcttgaatataaattctgcagaaattggtctatagctagcatggtttctcaatcaatcattgggaaacaatacttatgattatctcatcactttattctttgtatgatctttgcacttgcgttgtgccaaaaatgtcatgtaacacctcacttttaggctttggttttccagaccctccctccaacattttttagttaaaagaaagcatgtcataggaaggtgatatatgtaatgatccatagagaaatcaaacaaaaattaaaggtgaatcaaacagaacagaaaagttcaagaaaccttgttagcatgtcggggtaaacatcatgccattccacctcttcaataatttccacaatgtgctttgtcctttgtttaaattctattgattccagaagatgcagatcagcactcaaaaatgtgctttcgtcaattggataagttacctattaaagatagatattaaggaaagaacacaagattaataaggaaatttaaggattggtgaaaattcatcagcaaattttgagagagaatatttgtaaacaagcaatggaacaattattcatcagaaatcgttatactatgaaatagctgaagacaccaaaacaatattacccttccattagtgaagacagcattgacaccagattcaagcccaagcaccctatacaaagaattctgcacctgataacaagacgtctaattaatacaaattatcatgattaacagacaaaaaaatattagtgaaaaactctgaaattgtttaacatagtgcaaactaaaatgaaatacataaaagaggagcagaaatggaaaaaaaaagcagcgggaaaccatttccttcaggtattagtatcaaatagaaaaagtaaaagtatgaggcacagggttgggttgttaagaactaaaagcaaatgtccaaatggcaagataaactagaagtaccttagtcaaatgctttctcacttcaccggcaggaaattctaggagggcagacctatagcccttagatggtaacccattggcttcaccaagctcgcaaaccatatcaacaaatgcttgagtgcttcagcttccataggaggtgtaaggatgtaattcttctcatatagtgagcaaagctgatccaagaagtccaatacattcgtcttatgactgcacaccatgcgttcaaacatttgatataaaaatggtgcttccactttggaaaggaattgacaaaatcacagaattgaaattaaacaatctattaaaattcaaccagcttttgaattaaaagcaaaatccaaacacatacctatacaaggatgcagtaatttcaaagaccttaacaaataggaggctaaacaaattaggattccgattggcattaaatagaagacctacacgagcatttttggatccttctatctgtagcattatgttcaaataacaaaaacatcaaatatgcttaaaagcatcaaataaattgctccaactcataataggcattaggcacaataatttaaaaagaaccaagaagatttaaaagaaatgcatattggtattaaccagataatgtatgccttgttgaagtaatttcatcccattccttgaagtgatatcaacagcaagaagatgtgtcacagccttcgtatcatccattgctggtttggatcaaaacaatccacatgtgacaacaaaagaaacagactgtacaaaagaaattaaagattctaatatttaaacaacttacttccaggagaatgcaagtagacaatgtcatttagtatagattcctccccaaaagtaaacattgacagagatatgaaccttggtttgctgtcagaaataatctacaccaaacgattagcattagaaactggttatgagtatcatataaatgttcccaaaatttaaattattaaattaactactataccttaggattataacgttgtataccagcttctgatagaaacttagctaatacatcagtgtcagacattatttgtccaaaatatattgttcctgtattcttggagtctcatcattcaaggcatttataagagcttcctggtaaacacaattgcatagaaataagtagaggaaaaatttattctactaacactattaatacatcacagttatactagacaaagaaaaattgggcacaacgcaccttaaactaaagttgagcacatgcagaatatccaaaattaaacaacacactaacgaaaactacaacagtatggataagtgcaagtagtcaaacaatgataagtatacgaaggggatcttacaaatttatagatagctgtgagtttattagtgcattgtaagagactcatctgcattttactacataaagtgtatccagtgctatttattttattttgttttgggttgccatcattaagaaaaagcacatataaaaaacaaagagaaagaactcattttacaaagaagaccacaatattactgttagatattattacagaaagtagtattagagatcacctctcatgcttgcactgtaattttctttttctgttttgggcttcagttagtggtctgggtcaagcttatcagctagcccatagtcagcttctatcagttgtaactgatttttacaagtgtcaaagatgatatgttttaactacagcagtttagtatgagattatttccattattactcattattttgttttcttattttgtaaacctccttcattataaataagagtatttcgtgtggtctgatacgacaacacaacagtaaataattcttacatggtatcagagcaggttattattgacaaagaaataatgaaagtcgttcttcattggggacctactatcatcggtggacctttatgctcactgcccttcttttgatgaccctttctcctttcttctacacgccaaacagttttggttccattatcactgcagtgtgccttcgttctcgcatgaacagtaccagtaccgcaagctgctgcaaccctctattggcagtcatcgcgccttctatctccgacacaaccatacccccggagtctccacctcccggcgaccagcgtgcaccctgtcatgtcgccgttcaacgacgcacgcaccaccactctccagcgtgtgtgcatcacatgccagctacagatctgtgcatgacacctaccgccaggctgtccacatgtgcaaccaactcaacacaccgccacagcaaccccacgcagggcccttttccagcgagaaaagttcacgcacataacgtgtgacgtgtcacactggaaccgtatccttctgcctcagggcatgctattttcaaaggtgaacaatacccatcaccactacaggctttcattggttgcctccgaggtttattcggcacaaccccatgatcggaatcgtcttttgtttctgttgggtttaccacatttgtaacaagcttggttcatatgatatatatgctccagcttgaggggagtgtcaaagatatgatccgatatgttttaattagagcagtttagtatgggattatttccattattactcattattttgtttccttattttgtaaacctccttcattataaataagagtatttcttgtggtcagtatgacaacacacaacagtaaatcttacaacaagaatcaataatacagtttactttcagttgcacaaatcttttttctctttctctgaattctatcagaattaatgtaaacagagtgattataggtgattatgtaattagtgatatcatgtaattacagtaatcatgtaactataaatccttgtacggtacttattacactctgtatatataatttgctctttaatacacagcaattcatcacatttttcattttctctttctctcaacacttatatcttggccaaccaccttgtacaatataaaatattgtgaattgacagcagaattgaagaaaaagtacaaaaaaaaagaggaaataaaattttaaggcagtggaaaatattaaaaaaatcattacctcagtgggatcaataacaaggccattcatcaacaatgaacattgaagcttagacaaaccaagcttaaatacaaacttggaactttcttgtgacaattccttcaacttttgattcttatacagctttagtaatatctcttgaggtgggaatttacctttgatctataaaatacagagaatatttaattcatgtttaaaataaattagaacgtaatgttactgctaaaatattgaagcactacattagtcaaatgtcagaaggatactaatcaacaaaaatactataaaacttacaagattgtttccacaaacactccttcaacatggtgcagttcaagagcatcatctgcattgccatctgactcgatgtgtaatttgttaacctacaaaaatgtacaatatagttcctttaattgaattgaaaataagattagttttaaagtctcaaaacaactgctaaaatgtgtttcataaaaatcttagatataatagcatcatctatttgtgtatgctaattccaacagcataaacatttttatttttatcaatataataaaaacctctaaacaaacctttcagatttatttttcccttttttgtcatgttaatggggaagagatgaagccacttaaaaggttgtcaaatgttacgcataggttcatgattttttttaaaataaataattgaattcataggaaagtgattatctagaaatttgcatagtgatagacaaggggaaaatttaaaaagaaaaaaagattatgagtcataaggttgaaattcaaagttaagtcaaatcaagcacttggaaggttcaaattttgaactttaatgaatcaaatagatatgtagttaggttcaagatgggtggagtaaaatgaaagaacaacataacaatattaactgcatctgccacttttctttcctaattttggatttaagtcatgtgcttctggcatatgaagttttaacttttaaaccagtcgtaagtaagttcatggaaagacattgaactgaagatgacactaatgactaagtatcacactcatacattgctcaaaaaccggtaagccatttcagcaccataattctcgttgatataactgaagagacatataatctgaaaagagaaaaaaatgatgtcataaacttgccagtgaaactataacatatagaaaatttctatgacatttatcacacacacattcctgaacaacaaaaggtaaaaattaccgtagttgaaatatctcatcgctgtgtcttttgtagcatgattttctaactgtgtaacaaactcgaagaatacaacacaatcccaaacctcacaggaaaattattttcatacaatgatatgatcatatcaatggactgcaaaattccaaacaataaagcaagtgactaagattttgcttggaaacatatacaatgaataatgtgaaaatgttaagcttgaggaaaaaaaacttgcctccagaccacaacgggttgctggatcaagaacaaagacagcatggaaaaggtttttacggatgtaacgtagctgcccagggaaggctggcatcaagaactaacaaaataaatgtaaaatatgttaggttaggctaaatctttacacaaacagtacttcagtcagaaaaatctcttgaacactttgattctatattttttaattaaaaaaataaagctaatccaaacacactaattcacctcttctaaattgttactccaccatttatatttagcatcttcttccaagttgttgagataatgaacatgactagaatgaaaatcaactcgaaatatactggactctggaggaggtgaagttgagagcaatttcttcaaagtgcttgaggaatctgcaaatagtgagaatatcaacaatacagttcaggtgtatgtacatatcacaaatgagttttataaagagaaaaaaatggtagcaattaatagaagtttaaaaaattaagggcttgtccagtttgagaaaaatttatgtttccataaataattacaaaatgccaccttggtaattatttatgaaaataggaaatgaaaaccaaaacattttcttaatccaaacaggtaatcgtgccattttttctatggaaaaaataccattaacttcttcacctcccactcatcttccctcctttcaatacaaattgttttcttgggagactatccaatgttacttttgaaaacaacattttcttaggtaatatgcatcagatgactatttttcatctgtcaattactaggtcagtgaatagttaaacagaaattagtgcaatagtaaaaatatgacaaaatgaaaattagatggcattcaccttcaattttgagaactgatcagtcaacaagagatcctgacggatcaagtcaatcaacctaataaagaataacaggaaaatagtatcagaaattcaaaaatttcagcactgccaaaccaggatcaaaccactgctaaatatttacattcttagaacctaaaaactattctcccaaacataataacaattagttgacaaagcatttacaattatatataggaaatgactttaatccaacataaaaaaaggaattccatacgataagtaagatactttgaataggctcaactcaaataaacacaaaaccaaaccataggtatataaatagacctgggtttggctcttccaatcttgtgctaagtgctaactaacatcaaaagaaccataaatatgagacagcaaagtcttaatgtgctggaggggattgaaaaatactaactctagctataatagaggcacaaacatgaatacgacaagataatgtataaattatcagtaggaaaaaaagttattacagatagaggtcaacatcttcgacattgactaaagcaccattgagagccattaaagacttgccaggtgggaccatccgctggtttgccattatttcatctcgaacagaatcatcaagctgtcatgagaagcagttccgtaagaataatagacatttttttccaaggaaaatgtctaaaaatatgtgagtgcctaacataaataacaattaacaagattatgtaccttcatgcgagacaaggaagaaactatgctagggaagttttgattgatttcctgcattgactgcagaggatcagaagcacggacaattctctgtacagtttgatgtcctagatctgttaccatcagaaagaaggggaaaaaacatagaacactgttcattgaagccaactgcgataggattcagcttccaatctttccaattatcagaggaaaagagaaaaatattttaaataccctttaattcccaaacatcaagtgtgtctgatacagttgatgacaatagataatcccgaaaagccatgacctcagatgttaagtcaggtttacgttcctgtgagtaaacaaaaacaggtaaatttattggtaacactagtgtctggataattttgaggtggggcaataaatatacttcactataaatattaatatacttttataatgttatgaaattaaccaaagcaaataatgagttgacaaccatatggaagcagaaaaaaaaaattaatcccacaaaagagactaggaaataaatttctgattcaaaactatgcactcttttctgttcataacaccacaagtatgcaaaaagtgggcaatgccaaaggatcttagcttccttcatcctgccaaaacctttcatattaatcgattaaaaggcattaaataatatcctacagtaaatatatcaagctgcaaggcagtgagaaggaaatggacacaactttacattatatctcgcaaagcacataatattatcacatttaacactcttttataaaaaaaaaaaaaagaaatgctagcaacacaatctctaacacacatcttctattattggttgaaatttattgaaaattacaaaattctcattatcatgtgtgtgtccaaaaacaaatgtgagtttacacaccagaagtttagagaatatgaatcctctgacttcctggctaagatcttcagttcgaggatcctctaaagtcacacctgcaatcctcactgtgttaatgagagaatcaatcatttaatcacaagtaatctttcttgatgtatataaatatccaaccattttaattggattagcaatatacaaaacaccaaaagaatttgtgaatccagaaataatttaacactaagaaatgtacttttcaattatctatttcaaagttataattaataaaatcttcaaacctgaaactcattgtaggaaaacaagatggagagtctttaacgaacgataaacttataaatcaatgcattgaggtaaggttggagaaggtcaatgctaactaactcaagtaaccagatggaaagaccataaagggtaaggaaaacttctttaaatagcagaattagaccttgagaatagtacatattaccatgcaaaatgaatgaaaggacattgttggaaactgcaacaaatctattgggaatagctgaatttaaagcttagattcatgaaattttagattcatgcaaggtgctttaattcaagtacttaggtagttgcacttgtgcttattcttcttgtaaatgtaatatgcaattaattaattcaaaagtgtgtgtattaactctgctagtgctaatcactcaagcatgtcacaggtttcttagtccaaatctaaaattgacatcgtaaaaaaaaaaaaatgcaagttcaaagaaaacttacataaagagtattgttaggatccaattgccccataccttgcaattggttcctaacaaggataataaattgtcaaatcctaggaatagcaatgcaagcatggaggtcatgaagtcaaagaaaattaaagaaagaatacttttataatttctcgaaaaatatgacattttaaaaattacaaaaattacaaagagtaaaaaattggaaaggatgatcaggcaatcacaatttcatgtactaactttcttctacaattgactcagtatgcaaagttaaagagaactagaagccttcactcaacatgtgtcaatcattctaacctttttttactgtactgtcatccatggccttatattccatattcttcagtgcaagttccacaccataaccacccaagttcactgattcaccagcaccaacagaactacaatgattgatatttgattcacatccagcaggcaacactggccgtacaacatacttaactttcccctaaaattattcagtcaacatattaatatagttgcatgggaaatatattagataagcattacatttttttttcaaattccaatcttaatatatgggacaacaatataaatctgtttaatgatttcatcgtttcacaactccttgactattaccatatcttcaaaaaacattagtgttgcatacaactaacatattaatctaaacttcacttgaagagatatataatatctgggatattttataacacagaagatggacatctcataattcaggtgcaattcaaataatttacattactcttatcagttttaaaccttttgtttcacattcttctctccattgaaatctcctggggttttatcaaaaaatgattatgtttacatcatttgatacttgaaagcaaatccattttggaggcttgtacagcagaatgctaaatgattataatagctgccaaaaactacatcacattatattttctaaagagttaggcaaacgctctgttaagtaaacaaaagtaaaaaagtttttataagaaatgagagcttttattatattgggtaatacaaaaatcattttacatgtgctttttaagtaaatagaagcatttagaaatgcctaaagggcattggttagcaagatcctaaattcctatagttaataccaaaacaagaaataaaagttaaggaatgtacctctttggcagctttaactaaagcaacatgaaactccttaaaacaattggttccaagtgcaccgtaaaggatagcaactggacttccaacacttaactcataatagacgtggtcaaaatcaaatatttcaggtgtctgaaatgaatcacctaccctgaaggcaaaagtttacaattgacaacaacattggaaaatttaaaaaaaataaataaaaaaaaaaaaaaaaaaaacaaacagaagtgcactaatggcaacaaagtactcacagctcagcagagccctgaagccactccagtaattcataaacatccaaaaacaagtgttcaccggtatccacccaacaacattttcctccatggcttttcaggtttacaccatgcaggggatctaattttctcctttcaatcttttctgttagcaacttttcctcagtctcatcatctgaataattttcatcacctaggggaaaagatgcaagagattcttccgctaattgctggtagagcatcagtctaggggatgctgatctcagcataagagagaactcaaataatgattttaatggttcccttagaagagggcgcccacattccaaaattttcttcagacaatctttagctgtttgagatctaacagcatcgttatcagtattaagccaaatctcaacgaagtcccagaaaaggtcctttttttcgttagataataattcactgtttccaaacaataaatggatgttataacatggaaattttacaattggccaaaaattgtagacagatttaaaaaaagaaaaatagtgtatgataatgtaaaagacaatatgtgctgcagtcgaatgctgcatatgaagtaacaaggcatttaactcggttgaaaacagtaatatatgttgtacataagaataagagggaacgacacaacaaaagtatttcacactcatcctcataagtcataactaaccacatgatgtaaagataaatcaaattccatgattttcagttcagccgaatatttccatatcatccatctatatgaatcataagacgagcaccatgtgccaaacttaataatctgatgatctttttgtcatctaaacaatctcttccgaccacaaaagacttcagaaagaaaaacaatcaggaaaagtatcacataatgcttcaaaattccaccacctgacccccacacactactaaatttgagttggaaattctagttttagacactacagtccattatgtcatgtctaactcaaacaaatgacaatgatatcccatttcacactcctttacacgcattcgtatacttcaacacaatttcaacaaaacattagaaacaagtctaaaaataacaccaccccacattacaaaaacacataaaaatgtttgaaaaaggaagagcaaggacatacgcagcttccaaaagcaggggagttccagaccacttagcacggagtgcagtttgaacattcttgggtctctgaggagtgtcagcaatggctgaaccaatattcacaacaccaacacaatgagaacccaacatcgagatctccaaaggcaccccatttgaatttgtggagcgagaatgaatgtgggttcagaattgatgccccatttgcacgtgcgacagctgaggaagtgagaggagcttcgaaagtttcgatctttgttctcacttcgaggactcgcaggttttttgggaagagacgaccaaaggcgacgactgcactaagtacgttagtgcagcgatcccatgttacatcttggttacttttttagataataattacatttcggttactaaaaataaaaaggattttctttataaaaaaaaaatacttttttgcgcctttgataaattaataacaatattagaagttattcagaaaaatgtagtattatattgtttatactttatatattataatatgtcagtttcttaactatttaaatttttccataaaaactatttagagtttttaaataagttcatatatttcagaaaaaaaaatgaattttaacttataaatattttttaattgaatttttttactccagccagcgatgaaaagttcttaatgttaagttgagtgctgaactcttcaatggattggccacaataatacatgttgcttctcctaatttcgcaagtgatcatttcaaaaattattttttatttaaagttgtataactaaatggataaactcacactagctgttaatttggaatcaatttgattccttagaagatatcataaaggaatttaggaatgtaataatattatttggttgatcattttttgagtcagatcatctattggtaagttattacctcacaaattagctaatcaaacacgagctctttttcaagtgaatttcttttttactcctcaatattaatagtcttttcagttgttgttcctcattggattctattaagtataagaaattgattaaaattatagtttaattttgatatattttttttaaagatttttatattatcaactaaaaaaatattattaaatgtgatttttttagtaattatacaaaagtaaattttattatatgtaatagatgacaatataaaaattttaaattgtcaatgtattttaattatttcttaattttttttaaataattcaagaaacctatgaatcatgtcccttgaatctttattctccatactattacatgcttaactcatgaggctgaactttgatatcaactgcaaaacaagagagggaaaaaaaacataagaaaataagaaagaatttaaattatgtttttgagatctcttaaaccttttgaaattgatcaaaagctttttgaaaaactttagcaaccaatgtaagaatgaaagggttttgtgaactaggagatgattcaaatgcaacaaaacattttataaaagcttttttttcatgaaaaatgtttatttcatataataactccttcttcatttgtaaaaaaagacaataaagataagaataggagaaattaaaataaatgattcatggaaaaatcttgaactacatttaattcttgattacttagtagttcatttacgaaaatactaattgataaaaatcttaatttcttacaagatttaaatatgtttttggttttaataagttagcattttttatttattttaatcttttctcccaaagttgtcagaattattcataaaataaatctcaattcactgaatatagctttttataatcaccttaagaccaaacaacttttgtttttccttttagcttctcccaccacctcaatagccacaaacactatgtaaaaaatctcttgcccaagaagcacttttgcctttgatcaataacatcattaagtactttcttcaagtgtaacacttttgtcagatcttgtacatacatcctactaggagataggtctaaactccccaagccctgtgggtcgtcaaccttgggattagagctatggatgaatttgagcctcttgaaaaaataccaaatctatgaaattcttccataaacctcatgatgtcctccttcaagatatgcaaaaagctttaatgaatttaatgtagattcattaactcggcttttagcacttccacattgccatattgcctcctttacctccttctccccaacctctcaaccaaaccaacactatcaatttgtgtgatttggttattttatgtctttcaatatttacaaaactaaatgccaattaaatcttgaattactatattagtattttagtgttaaaagtttaaatgggagctagtgttaaagttgtaaattatcaaaatatcacgtttacgtttctaacaattaatatgttgttaattagaattcattatggatatgattcatgaattaagaaggtaactgaaatatcttattcttactaggtgatattcttttactagtaagaataagatagtgtcaatttcttaaacaaattaatttaaaatttgaatgttatcttatgttatttttttttttcatgtttttttattacattatgataatgatatatatatatatatataatatatatatatatactatcaaataaatttaatttaattattttataaaatgattatgatgtacagtctatatttatgtaaatttagataaaaaaatgatttttttataattttaacatgattcataagaaaaatatttaattttgtaattttttttatccactaatgatcattattatcaaaataaatatcacgtttagtttagccttctttattagttctctgatacgaccgtttaacggcgcttcaatttattcattcttcttagttctttgacgtgaccgtttcgttctttctaacgacgcttcaattattaatctataaatacattgctattgtgtctgattcttccacaatcctactttcatcaaaacaggctttgcattgatttatggttcaggatttctattcaagaaggaagagaaaaaatctaatagagggaagaagatgagagaatactgattttttcttttgacatgcatgcatggcagaaagcatgttctctgcgtcttccttcttctcttatgttttctcttctttctcgcactctttagaacaattgcttggactgatattgaaggtaaggttttatctaatatgtattcatcttttaaggcagagttcttgattgcattgataagatatattgcaggaaattattaaagaaaatgaccaaggtgacttgttctaaagtattgtttttcaagaaggaagtattgttttgtctttagagtcatttgagtcaggtagaacagtttcagtgggtgcaacatcgaaagcaaaggctgggaaatcaactgccattggtgtttcaaaacatggaaatagagctgtatcttctgcatgttgatttttctttggttaagtacttttagatttgttttgatttctaactatttgtttcatcatctcaaaagagagttgtggcaacagagggtgccaagtctgatcaatatctgttcaagatatagcggtccagtctcaagccttgttaagtaccaaggattcaattaaggtattgtaggctgaactggagtataccaaacgttgcttaaaatcttataaatgtggttggactgtcgtctggattttcttggaagcaggaagatcgagagagattggtggtttgaaggtttaagattgaggaaccacgtattgagtaaaatcaagatcttgaggtgggaattttgcattatcaaataatgtttgaaaaactgtgaattttactgtagctttacaagatcatgaaggagcataagaaccccaaggttcttagtgagggaattttgcggatggtttctgctgttgaagattttggtgtctcacatataaagcttaaggtgcattatctgaatttacaaattttttagatattttatttgttgttggaagtttgtatggtttattgtaaatcctattttgcaggacttaattgatttgcttaatgaaattgggctgcagtcaagtaatgctgctactagaaatgcatcaattaagttcttgggtgttctgcatagatttgttggtcaaggtcactttgcattaactttcaaattttgatttctctcaattttgttttcaaggctctaaggtttttctccttgcagacattaaagggtttcttcttactgatgtaaagcctgcactgctcagtgccccggatacagagtatgagaagaatccattttaggtatattatgtttgttgaggttagttctatgcagggttttaaatagaatgctatagcggtgtagcagagcagagtgatcccttcccgctacgggtgctgctgtagtgaatcagtttagtgtagtgtccatagtgaagcaaatagcgggttgaatagtgtctgtagtgggtgctatgtattgattccaaaaaacccctctgaatagcgacattagggcttgttcagagggctatttgtgggatttaatttcctaaaatcatatttgtagatgtaattatagtgaaatgataaagaaggctttgatttaaaaaatgattgttgatgatatatataattcctatctaggaagctcgtatttaacgtttgttggtatttacttgtatgttttgtataagacgtctagactttttgttgttaatgatgaatgtcattggtttttaataatttttattatttttgagaattgatatgtatacagtatacttatataaactataaaaatttcaaaatagtggctatccgctatatgcaatctcgctatagtgttttttgagccagccgctacgctctgctatccgagatttaaaacccgggttctatgtagtatcatgatttcctaatgcggtcatttattttattttgtttcccctgcttcagggagcatctgtagttaccaagagaattgtcagggaaaaagacccatcttcaactgcagttgctggtgcactggatagcttgcctcggaggacatcagtggaaagatctcaccaactctcctgaagagcttggaaagccctgattggaaggtttggttgataagagctagcaatttgcttttaattttgtattcaaggttgcttttagctttcagtatttgaggaagtgtattatggtgctattgcttctaatgttgcagtgcattacttattataggttgtatggaatctgttgatgctgtaaacaaaataatggaagaggctaataagcgcattcaagcaactggaaatgacactccattagcatttttttttataatttttttaaccttatgctctctctctctttactctcccctttcatcaacttcctccccaaatggataagttgcatggtatcttttggtaattattctatatttctagctgattattttgttaattttcctaactgttttattaccaggtgacttgtttggggctcttaggggacgacttgttgataacaacaaaaacatttcatggcttccttgacagcaattggcaatgttgcatcagcaatgggtcaagctgtagagaaggcaagcaaggtaagaggattctgttctgttttcgtatccccccccacccccccctccccatttggtgctgttttgctgtttgaacatttctggaaatggtttgttgcagggtattctgtctgatatattgaaatgtcttggtgacaacaagaagcgcatgagagaatgtgtgctgaatacattagacgcttggctggctgctgtccatctggttgaaatggtctgtattctgtgctggtcctgtgttctttcattcttttgtcttggtatctgtgtccttagcatggttttcctataggttccatatattgcaattgctttgatggactctaaacttggtgcagaaggacgtaaattttttttattggttatcgaggcaactttctgtgttaagtagttttgctgaagctgcacaactgctgaagcctgcctcttctgcaatgatagtatgatctggttactctgcattctgctttttcattttttataccatttatcgaattagttctaatgttccatattcttggaacaaaatgtatgatgacttcttcttaggataaatcttccgatgttggcaaggcatcagagcttgtattaatgagatactaagagctagtagacatgaaatggtatgtgtataagaagaatgctgctttcttcccttgtttccttaatattcttgtaatatcaagcatcttcattgtttacttatttttagattgaaaagatggttaaagacattcatggaccagcaccgacactaattgttgagaagttaaaaccataaggagcttttcaaggcatgttctttggttcattcttctttgcgaatgttggtgaatttgtgcttatatatcttcccttactcctcctttttatggtctttagagtcatttgagtcgggtagagcagtttcagtgggtgcaacatcaaaagccaaaggctggtaaatcaactgccaatggtgttttaaaccatggaaatagagctatatcttctgtatgttgacttttatttggttaagtactttcgatttgttttgatttctaactatttgtttcatcatctcaaaagagagttgtggcaacagagagtgccaagtctgaatcaatatattttcaagatcagtctcaagccttgttaaatatcaaggattcaaataaggtattgttggctgaactggagtataccaaacgttgtttaaaatcttataaatatgtggttggactgtcatctggattttcttgcaagcaggaagatcgagagagaatggtggtttgaaggtttaagtattgagcaaattcaagatcttgaggtgggactgtttgttgaggaataatcatgcataacttgaactatctataagtattgaattataataaatgtgcctgcaattttcagaatgataaagtatttcagagaggaattacataggagactcttaagtgcagattttaagaagcaagttgatggacttgaaattctgcagaaggtgttgttcttttaaccttctgaattacattcttttgaagtgttgagtgcactagaaattgtacaaactgctattgcatatttcaggcacttccatccattgctgaggaagttatagaagttttggacagtcttctgaggtggtttgtgttgcagttcttcaaatcaaacacaatatgtctattgaaagttcaatttatttttgtttttgttgtgatttcagttttcttcttttcctttccttccttttcaaggagatgtctgctgttagtcttaactttattcaatttaatttataggagtatacttacttgatagagtcttatcttttcttaattgcttaggtgctggaatttcttcctgaactgcttgacactttgaaggacgaggggttctcttgaccgaatctgaaggggcagtgtttcttctgtgcctagtagagaaggtttatattagcaactttaatatttgtggcacctgaggatgttgttattccagtgaatctttctgatggtatggttgatttcagcaaatttttggtttacatagataatactagtttgactagtgtacttccttgggtgttacagatgaggaagtcacaattcatttcttattttaatgttgcagttagggcataacattgagaaagtacgagaaaaaatgcgggagctgacaaaacaatttgttgccatatattctgcgtctaaatgtttcccttatatattagagggttttcgctcagagaataaccgaactcgaattgaatgtgccaatcttgttggatttattattgatcatcatggtgcagaggtattgttactagtgctttttaatgaattcttttcctattcagtattttccttgcatagttactccttgcattatgtggacagattagtgggcagctaaagtcgttgcaaattgttgcaagtttgactgcagaacgggatggtgaaactaggaatgctgcattaaatacactagctactggttttaagattctaggtatgccatacactgtagaactccatctttctggtttccaatgtgcttgaaaaatacttgtgcctagtgatatatatatatatatatatatatatatatatatctttgaaaaggaaacttgttaaaccaaaagtacatctgtgttattttgttgaattgggttgtgtttttgcatcagtgtgtaaatttcaagagttcaatgtcctttctatggatgaccacttgaggaacttatggtagagcagtttcagtgggtgcaacatcaaaagcaaaggctgggaaatcaactgccaacggtttttcaaaacatggaaatagagctgtatcttctgtatgttgacttttgtttggttaagtacttttcgaattgttttgatttctaactatttgtttcatcatctcaaaagagagttgtggcaacagatggtgccaagtctgaatcaatatctttcaagatatagcgctccagtctgaagccttgttaaatatcaagttttttccaaatctttataaaataataaaaagttaatcaatttattcatactctgacattttaaaactatatattacattaattatgatatatatatatatatatatacacacacatatatatgaatgaaggcatccaataattttaaataaatataattttttgtatatataatttttaaaatttaaattcagtaattttcagatgaaattattcaaaaaatattgtaaaagatgtttcccgcgtgtagttttcaaccaagacgctgcacgtgaaagatcccttagatttgtcaaacatgagatgaagaacccatggattggatatacaacaacccccttcgttctttacttttcttttgtattttttaggtagaaagtctgcatttcactgctatcgtgcttaatatatatatttactaatttattaacaatataaaaggttgttcataaccataaaaagagaaaagaaaaagaaaaaaggttgttcataattaacaagtcgcatttcactgctaatgttcttgatgtgtctttgaatggaattgaatcatcgaaccgaaaagttaatcttcctttttcaatatataaaacattagttaagaatcaagttttttttttaatgtctctctcggcgtcttctcaattaaattctacaaactcgttaagaaatttaaaaataaagaacctttactgagatataaatttgtcacaaagaaattttttatagaataataaatatttaattgaagaaatatagaagagaacaacgacaaaaaaataaattaatttcattctataaaactattgtcatgatagcaaagttaatttagttaacaaataattgtgtatctcttgtttataacaactgacttgggtccacgtgacttctaaaattgtattcaggcaagcaagcaagctttggtcatcctaagactaatcgtgatattcttaattaattcaaggtttttgtttcaaagctatactaagaataacgtagcaaaattttgtattctacttctacaagataacattccaatttctaaagaatgaagagaagcaggttggagaaaaggaacaaatgacgcgtcaaagggctgctgctgtagtcttaattggccaaattggcgaaacgaaacaccgttggtttagaagacataatcacaaatttcataaaaaaaaaaaagaagaagacatggtcacaaattgggaaagttattgagactcctatgttgaatggactcaggctgcttcattctaattcttctgttaggactgtagaaaggtcattcgagagtaccctggaaaaggaggcagcctccaagaagacaagaacagaagcaaaagattattttttccaagattggtgctattgacaacagatgtactaattcgccgcaaacatgataaagataacaaaaacaccttcactaacagtttaactaatttactagtattatgcatctgcttcttcaacaacaccaataagcgccaccacacaggaagctcaactagcagatggtggacgctgctgtgaaagaaaaggtgcttccaccactgttcccttgatgttgtcaccgacaattacagtgtctccttccgaagcagctcgcctcttgatgtaacctaatccaaagtgttcagattccttccttccagatgtgtagctggttaactttccaacctgcaaaacttgcaaaaaccatcaatttctttccaactcgttaaggagaatgttaggattacagaaagcaacccaacatcacaagcactgggctactgactcagggaaccactattagttatccattttttttacaagatggttctccagagaaacattgtaactggagttttcaccacgtacctgtcatctttagtttcaactgggaattacgctatgcaaatttccatcttcctttttaacaaatacataaggattgaagaaaaaaatagtgaacatttttcaaaagaaattatatagcacctttttcccatcaactgtaataatgctgccaggttctgcagcagcagaaagatgaaatccccataacctctgcttgattccatcatatgttatgagcctagatatagtctcctgacctttgtaacaacctgaaaaattcatagtcagactaattattcagcaagtttcaacttttacgcagatgggtagcggcaaaagaacagttgcacacccttatttagagaaaccgagttccaaagacaggcctccaggacattgaattcatttgtaagctccattccaggagtgggccttcctaagaaatcaagttatgatcaaattagataaaagaatcatagggagtgaaactatatacacaaaaaaaaaaaaaaaaattactcgcatttcaaaaaacttccagtttcattatccaatagaatataccattcaacccaaagcaaatattaaatgcttacaaatcttctagtagttataaaaaccagtcattcattttttggttttacacaaatatcctccataggaagaaatttgcttgacatatgatcaaacacaaaatgagaacctctcccaatagggactgaaactgtagttcaccacgttatggggactatcttccattacttccaaccctcattggtaatactagctattcttaactagaaggaaattgtgcactccacaattgacatctaaatgcatttgtattctttcttgcaccaaaagtccgcatgggcttgaagcattttttacatacaccggaagaattaggttgaaaataacatgatgagaattcaagtaatgtcataattcctaattccagtgtgcaagtgtgcaactgtgcaacctcaattttcattagtggaaaattggatcttggggaaaaagaacaaagatttatttatgccagtatcattagtctccaagactactcctaaataattcctaaattacgacagaaacaatatgcaggaaataagttagtatgctatattattcaactgtagaaaccaatgacagacatagaaatatgcacacaatctaaacaattcagtacctcgaataatccgtaatttattccatgcattagaacccattgggattgctccttgagtaagaatagctttccaaatggatgcagcagccgctggagacatcaataatgaaaaaccatcttcagaaatgatgtttccaacccctatagttacaggctgcttatcaacctacaaattacaatacaaatatatttgagagaatttgttcacaataataacaaaagactatacaggtctttaagctttcaacaaaagggctaaacaattggaaaaaacaattactaggttttggtattgcagttgaaagtttactactttggaagtaacacatatacacatgagaaatgctaacaatacaatctctagcacactcttttgaatacactctctactcttggctaaaatttaatgaaaatcacaaagattgtgtaggttcactacttcactccttatttaatgaagttcattcatgatgttttagttttccataaattttaaccaataagagagatgttgttagcactccttttcaacacattctaaattttgaagttatgtaaaagatgcaaccacaatccatgggaacttgttgccaaaacaaaatttgcaattacaaaatatatgctcgttaaacaaccaaaatatgcatttctgacagtaagaaagttatcagtgagaaacaaatacatgaagcttaaaactagcaaataagacacgattgatcatgtaagttgtttttggacaaactaaataaataaaggcataaacccatgcagtcatcatcaaacacacaagaccatttgtatcttgtagagagaaaccggtgatgaaaaagacaactggtaattagtacacatacttcaaaaaagccagtttcatccagcttacattaaaatgtagatgtgtgccatatggttttccgacaagatcaccaaggttcaagttctccatcacctgcccattcattatactgaaaattaccaactctgtcattctcaacacaaaataggtataattatgtaacttacttggccacttttgggtcccaccaaaacaaaaaaactggtttgcttagttatgtcttgaatctctaccttatcagcaaaaaatatgtaccttaaaatcattacatgtaaaagatttagttcatgtatttgataatattcatcaggaaaggcaactatttggtttctctctttttccttttagttttacttctgttggtaaatccttacatcacaactaacaagaaattacctacttgttcagcatttcagtaatggatgtacaggtctctggtgaaaccactaatgttatcgcatttttctatcaaaaaccaacaagagaaagtggtcagctacatgataattaattatattgtagaaaagacaaacaaatgaattttgtgagaaggataagaaaagaaaatcaccatgagccatgcatgtgcgatatctattgttcgagctgttggtgttacaaaaacagtgtcacatccctaaggatttcagttagagatccaattacttaatcctgtattataatatgaaatataaaaaagaaattgacaagaacttgccaataacacataaatgtagaaacaatgctactttctttcaatacatacttgtccttcatgtagagattcgaagtttgcagtactctggttgtgaaggaactgaatgcgatcttctccactgactttgtttcaggtgagccaaaacatttgcatgtaaaattaagaaaacattgaaatatgtcaaggaccaactcttaatagcctaagaaaagcaagtacctcttatccgaccgaagtgtgaaagatccacaacctatgccatcagatgtcataaagaattaatttaagcaaacaaataaatcctacattatctaacaatatattaatatacatttataaattggtaagcatgcaattataagacttcaaatttgtattagcttttacaaaaacttgatagcaagctatcacataatattttgtagaaactctagaattacaattcaataatctacaaccttgagctaatccaagcccacaaaatacatgtaggttagttcacatttactgtattacttctatttttttaaaattacagactgaataaaagaagttccagagtaagtaatagaagttacaggctgaaaaattaaagtctgtaatttttatgagtttgtaacttttataactcaaaccaggaaattttataagttcgtaacttctattactcaatgtgtaacatttgacataaagtcttcaatttcaaaaaataataccaagcctgtatcttttactatttaattgtagcatatgatataaagtctactgcaatttcaaaaaacaaatagtacagtactcctttttttagagggagcaccaaagtgaaccaccaaagtaaaagagaattaagaaccaacgaaataagcagtgaagatttaccatattttgtttggccaatatgacaaagcatctctagaaccataaataaatcaattcaaagaagcaaacaattaaaacttgcattgattcttgtggtttatattgtttctaccaaatgaagttgttcaagcagagataatgaggaagcacattaagctacaggcgttaaaaaaaaataaaaaaaaaaaaaacactaaataaattacataccacaaccccgttgtccacagcagccagtgctacatcatcattatgaaatgtctcaatgatcccttcaccagaaatctctgcgcctgcagttttgatagtatcctgcaatgagtaaaattaataatttgacagtaaaaaaattgcacttagccacctgatttctcttctctcaagccatatcataagggtattccaaaaaacaagagttattatatatttttagtccttatatgttacactcattttaatttggttcttatatgacaaactttcaattcagtccctacacatatcctttaaatttagtaatcactgtctgttgttgatatgatattgtctgtcggaggtataactcaatgtagtgtagaaccaaataaaaaatgtagggatcagaaatactctatttttttgtagtgacaatcattttcaactcaattgctaggtaaacttattcgtaaatccataccagtctcagtatgaagtggcaacaaacagcaagaacaacattgaaatatattatacaaatagagactaaattgaaagccttttacaattaggaagccttttaaaagcaaaattatctgttttttcttaaaaaaaattgtaaaatcgagttctctactgccataagttatcaatcacaaataacagcgcatagtggctatttctaaaaatgctatagcagcatggtcactattctgaatttttttacagtttatataatgtatatccatataaattctcaaaactgataaaaaaaattactcaaaattcatgacattcataattaacaataaaaattcataggtgtcttacacaaaacatacaagaaaataccaacaaaagtcatggtaattggtaaccactatccactaaggtttaagcctctaaggttagaaataactaaattgtctaaacgtattcaaaataaaagttttctagatatgaatcatcaatcatcatcttctaaatccaagtcaccgtctttatcattttcactactgttacagctgtagatttcttcctcttactcctcttgaacataatcaatttctaattcttctgctgaaggtgcagcacctctcctcagttttatttgatgcctagtgcatgttgaagtctcacccacaccagctaaattggcaacatctcccccaatcaagttgttgtcacagtcaaaatccaaatcatcttcagcatcctcgccatctcctcatttctcccactaaccattcatcactaccatcaatatcatcaaggacaatgggatgacatcacgagtgtcaaagtgttgcttaagagcttggttatatttaatataaaccaagtcttgaatcttttgatgctcaagcctacttctcttcttcaagtaaatctatattataattaaaacaagttagtttcacaatcattgtatgaaaactctatatatttaaaacttctaatattgacgtatgtgctcaaaagtactccaattacgctcaaatccccatgaactacaagttaagctcagtactttaatggcaagcttttgaagatttggagtatgcaatccctcctccaccagtcagctgtaatgcagtgcaacaccttatttattagggcaactaacttaaataaattgtagtgaaattaaatttcaaaaaaaagaaatgcagttttgcacttaccaggagctactgtagtcctttgccttattgccactttatacgtagacaactcgcttaaaaccttatctacaggtttgttattttcactaagcctctcaatgcacctataaagtccttccatcacttcaggatcaagatcaagtcttggatttttgtagaagaactcgggttttagaaaatgacctgctgcatgcaatggatgattgagttgacatttccatcttctaatgattgcaaatatttctttgtacttttcttcattccctttgaaagaactttgaattgtctccttggctctatcaattgctttataaatgtaacccattgcaggctttttctcattattaactagcctaagcacatgcacaataggccgcatagccttaaggatgtaaacagcatcattccaaaatgaaggcataagaacaatgccagctgccctattcacctcacgatctttagcaatattagttttcatccattcatccgaagtgaacattcttctaagattatttttctgattatgcagcctttgcaaagtaagaaatgaagtaacaaaccttttcactccatgtctaaccaattccatcttgtttgtgaactttctcatcatgttcaaagccaatgtgtggttatagataaaactaacaagatagatgcctcttcgtatagcctttttaacttcagccatcttcccaatgtcctctagcatcaagtctatgcaatgggaagcacatggagtccaaaacaaatgctccctcttgatttctaaaattttccccaagactgaaatcaataaacttaatatgagtaacaaactaacaattaacaattaaaattgtgaaattaattaataataattcttacaagctaatacaaaattacttccattgttcgtgatcacttgcaccacattttttctccaatatcctcatcaaaactttccaagagctcaaatagtctcacctgagtcacctcagtcttcatgcacctagaagcatcaacgctcctcacaaacattgatcccccttggaaaatccaccaaaaaattcatcaaggttctattcattctatccgtcaatgcatctaacataacggaacatccatacactgctcgttcttcttcatgactcttaagaaatcgctttgtgtattccaactcctttttaaggagtggacctctaaacacatggcagcaccattggttacaaaggaatcccgtttgtaaccaagaatcgtactatatattgctctagctttcctgtcagaagcaccactggttacaaactttggcatttcgggtcttctttgaagcagataaagagacctcacctgctgttagaggccttttccctctttggagattcgaaatttcctgcatatcttccatctcatgttgcaactcattcccagcaggtaaagagacctcacctgttgttagatttcttttacctcttcggagattcgaaatttaccgcatttcatccaagtcaagtcacggtacagaaactcattgccagcaggtaaaaagacctcacttgatgttagataccttttccctcttcggaaattccaaattttccgcattcttccatgtcacgttcatgcatctcattcccagcatgtaaaaagaactcacttgatgtttgaggtcctttccctcttcgaaggttccgaattgcccgcatttcttccatgtcacattcatgcaaccaattcacgttgcatgtaacatcttccccttgttgaggggaagacgctgatgcaggcccttcctgttgcgaggacgctgccatgacttagaagaaagaggcacgagtcgccggacaaagaaaaactcgccggaacggagagaagagaggcaaagctaggtcgaggctgaaaaacctttttcaccgggttttatcagcaacggtgaaagccctaaaatagccgcaagaaaaccctaacgtgagggatttttcggaatgttacgggtgcagcgcgatagcggcgttacacaccgcgattccggcgacgctgaatcgcgccgggaacgacgctgtagcgacgctattgagaagagtgtagaacaagaaataagaaagggaagtttacaagtgctggaaaattaccaggaagtcatggtcgatgggaggaggagaaaggtcgaaaggtgaggactgggcacaaattgaccaagacattagcttcttcttcttctccttcacgagatggtggtgggaccaaaacgcaacgtttcggggcaacacagagagacgccatgttaatgcttggtttggaggatggttccaccaagttgcagctgctgccaccggcaccaccgttgttgtcattttggattagataatggacaacagaacagagtctctctgtctctctctctctctctctcccccacaaacactactctgttcgggatttttattcttggaacccgtgcacggttttttttagtaaaaaaaaaaaaacgagcgagagatacaaaacaataatataaaatgtttaaatctatagagtaataaaactacattttcctaacctacttcttgcttctccttacttcgcaggttcggttccttacctgcttcttgcttctccttgcttcgcaggttcggttctgcttctctttgtttcggtctcacttttcccagcttcggtccactaccatacctcagcttcgttattttttcttctacaccagcattccaaacctttttttttatttcaaaactgcctctcctctctctcctctgctctgtgctctctctccctccctctgctctgtgggtctctctccctccctctgctcgtggctctctctccctctgctccgtagctctctctccctcgctctgctcggtgccgctctctctccctctgctccgtgcctctctctccctctgctccgtcgctctctccccctttgctccgtcttctcctctcttttctactctttcattctctctcttttccttctccgttccttcctcagcttcttcctttcctttcctcacacggtgctcagctattcctttccttttcagctttttccaaaactcccgcttctcacaagtatcagtgtttctcttctacccatctcctctgtaaatagcaagattatttttctgtttcaacattttttggggtttttgttattcttttgcaatttagaaactgattgatgttgaaacctgcaggtgcatgttgttcttctgcttcactttatggagcatgttcacgtaagcaggtaataacctttggtatttaatttctaaattttagatatttcattggttctactgactcactcctatcatgcttcattggtttttgtggattattttggtaagatttatttgctctctaatattgaaaaaatgaaaaatgcttggtgttgtgtgctgaaatgaacagtcagtttttctttctcgaggaagttctgatgagcagtgacagtgggaatctcacttattagcaagaattgcatttacacaaaaagattttgataaagaatttttccgatgatttttatttttactttttttctgtttacctggaaacactttttggtcttaggttgtgttgaataaaagaaatatgttttctttttcggtttagtgatgaaacaaataaaacatgactactaaagtccatattggagtgcacaaaacaaatcatagttgcatagcttaagtccttaagtcctcacttggttgaaaagcatgttcattgttgcccagtttcatccccaattctttctactaatcaaaacaatgatactaaaggtttagacttttcattcaatgtgaattagaaaatgtaggctgttgttctgagtggagaaaaatttgtttctaattggttttatattcggtgtgaatgacttctataatactatgagaattaggtactgagttgtacctaaatcttttggtttgcttcttctataatactctttgggttccacactctcaaacctctataatattaaggttggttataatactattagaattagatactgagttataagacaaatgatcactaactttacacattgtcttaatattgttatttaaatttatatatagttgatatattataattttatatatagctgatatattattaaaaactcaagaagattttacctctttcactacatttatccagaggtatgattatacatttatacttgctttgaaggtgtgtcttggttatatgcttttgcaattgttctagcacttagccttcaaatgtatggttgctgtgtcatccagaggtatgattatacattttacccttttagctgatatgtatatgtttgaccctctgtaattttctgaatgtcttataatttttcttttgctctttcaattatgtatccctctttacaagactatttgatgctgctgtggctgtttgccaagattttctgcaggttgcattctggagagcaataaatggctttggcttggcaattgtcattccagcactccagtctttcatcgctgatagctacaagcctacaaggatgaagtgagaggagctgggctttatctacttccgcattatggcctatttattgaataaagctagattagtaattcatcttcaaacctctttacgttaaataaagtgatatctgttttaatgaaatcttgggaaattaatttttatattattttcgcttcatttaatttggattttatacaaatgaaatcccactttttttttccttgcaaatgtcttaatgttcggaaggacttacttcccagtgaccatatttaggtatgttctttgacagggattttggtggttccaaattccaattctttttaaatttcaaatcccatattgaatgcaaagctgatattttctttatccatggtcagatagatgcaaacttacttcatctagcaagagtggcaatgcttgattgcagtcaacataaaaagttggatgtttctagagctaaagctgagcttgatatggcaaagaatcatttgtataattccataaggttcggattagtttggcactccagtctttcacaactacttctgaatatcagaactcaatcaatttgtcatgtttgtttcttttttcagtggaaatcattctttcttattacaatgcagtttttatcagagttatttctctgtccatgacatgtggacaggtggaatttgatgtcatacatacaattgttcaatcttatcatgtacaacatttagattgggttggttcacttaaggaaaggataaaaaacatatttacttagttatgaaatagattgattttattattccttttttaacatgattcatattaatgaatcaaaaaacattaattatttctctctactctctgctaagattggatttgtattagtttttaaatttgttatttatttatttttaggaaaatttcacatctgtttatgttgaagttgaaggtatcataatatctcccatggttttgctgtttcggaaaagtttattttttagcttggtttgtgattttttgtttttccatttttgtttgcttatggcattgtttttccattttttaaatctaatgtttaatgggttagatttataatttgttaataaaaactgagtgtagaaatggattcattctccttcattctccattttattgttgtcaagtaagaaaaactatagcaatccattatttacttctcagcaataattatttctttttttatgcttattatttctttcaagatatagcaatccattatttcgagatatagcaatgttgcaaaattagcaaaattatacttatcaacaatataattatttacttctcttttttgctgtatttttgtgctgttagctttccttcacactgcatatttttttcaactctcacaggtgttttcttgagttgctaaagagaagcaagaattatattgtaatagagctatttttctctcttatttctcactttcaacttttttcttgagtggtctttttctcttcttcatatgttagaaaaataaagttcaaatctaatcccatgtgttttttaatttcacacaaatatgtagcaacttattgggtgaatatgcagtgtttgacaaaatgcctcacccaaatttatattgttctgtttataatctttattatatattccatttcattttgtggtatgttactttcaccacctgagaggtatgttgtaaggaaaagacaaagactttgctctaaaatggtacaattgtatattccattttgtaataatttgtattcttcatgctacatattctccttcaccttacacctaatctctccttcactccctaaaaacaacatataattaaatatatcagcttattaagttgtgggctatcattacatataactgcaggtattattttgtttctcttcctcagttttatttttccacatacatgcttggcacttcagaactatctttttagttgctgatagtttattgagttgaatgtagaccagaactggattcttatgaaaggatatttatgcattggtaaggcatttataatttattccaaaatatttcctttatattttaatcttttctttatatttttcactattttttttcatcatggaataggaatctgtaatttgcttttacattagtggttgtggttaattgtagttttcgctttgctgtgattttttgttcctttttttccatttttgaatcagcttttttttttcctattttgatagcactctgcacaccagctagataaatctttttaataccttatcatctctctaaaaatagaactgcatagaggacttagaataacatggtttaaagtaaatcatagattatcaactgcatacattatatttataataattattatgaactgcatacattatatgcttaacattatgagctccacatattggattatatttattcattaaaagaagctaaaagaagaaaaagagaaaaacttttaattagaaatatattttatttttaactgatatatagcctcattcaattctccaacctctttacttgaagctcttttgtttttattctattgtttcagctctccatcaaggttaacttaactaattaacacaatttattttgttaaattatattctaatatcttgagttattatgttaggtatgggcaacataagtctgtgagcaaaagcaaagaacttgcaacattcaggtttttctctcatttatatggatgcccaagcttctatttctgtagcatattagtttgaattctaaatagataatggctaggatgagtgtggaccctaattttggaattgggattttggtcttctgaaacaaatttaagtggttggctttagtttgtgagcactaaaggaataattgccccacatgttagaaatataatatatagaaatcattcatgtgtcttcatctaacaaagcttttgagatagttaattctgattcataagattgtatcaaaaccttcatgaccaagagctctagagttcaattcttgcttcctttattcttctaataaaataattctaattcagctcaaagtaggtgggactatgcaattatacattttccatgcttcaaggatgaaagggctccttatttttaactctttttatttaattcaattgttatgataatcagcataataatgtttagttaatatatttattagaaaataatagtttgattcttagttataagacaatcaaagttaattaagttaaattagtttatcaataatatcataataaatattttttggttataataaacataaaaattaaaattactttataaaaatgatttttgttataagaaagttttaaattacttactcaccatatcataatataaattatttttgatttcatatttttatgtagaaactataattatcatttatgagaaatgattattctttgagccatcacgagcaaatttttacacaaaaaaagtttttgttaaaaattatttaacacaattacatatcaaacaatcaacaatattaaataatatataatttgagataaagtaatttaaactcctgtatccactttctctaaaggattgtaacccaactataacaaaaatataatcacattatccaaatatatttttttttttaaaaaaagaactccaagttgtggttttgtttgttttttaaatttcatttttaaatgatagaaactacaattatcatttatcggaaataattattctctagaaaatttaattaagatttgaaatttttaaactctttatttagttcaattattacgataacaagtagagtaacaattaattaatatatttattagaaaaataatagtttgattatttattataagataatcaaaatgaattaatttaaattattttatcaataacatcataaataatttttttgttataatacatataaatattaaaattaattttaaaaaatatagcggagcggagcagagcagagctacccgtgcatatgcgcatacaataatttagcaatttatcttttacttttaatttttaagtttgcttatacaataatttttaatcattaaacattaaatattaaaacattgctaaatttatcttttacttttaatttttaagtttactttatcaataatatcataaattatttttataattataacacatataaatattaaaatttattttaaaaaatataacggcgcagagctacccttgcgatacatcagtgcttattgattccattcctcaaacaatgcaatgaaacactctctatttcttagtggagtccttacttttttattagctgatatatttagcaatttatgttttatgttttatattttatttttaagtttgcttatacaatataattcttaatcattaaacattaaaaatattttatacaaatctaacatagcacggcggagcgaagcggagccgtcccgtgcgtatgcgcacgggtcctaagactagttttatataatatgtagataaggtgtcgggaatgcagtaatacattttattaccattttttgtgattttttttaaaattattatgagaaaatacatccgattacaaactaataatacattataatacttgtttaatgtcttttttattattatgaaaaaaatcaattacggactaatatgtgaatatataattattaaactcatttattattaacatgttggctaaaaagaaagattaagatgtcatgctaatgcttgattttaaggagggttcaaccaggttgctagtaccatttttgtcattttggattagataattaataataggctatctcaaacatgcacgttattctgctctgcacggtggacaatccaattttaatataaaataataataaatacaaaacaaaaaaaaaggtaagtgcatgaggtagagaaatttgaccaaatgaattgcacaaaaaggacgcaaaaaaagttgtttgaacattttgatttttttaggaaataattgaacatttgataattaataaaatatattaaattaaattaaatagaatcaagcgcaataaataaaaatcaaatagaatgatacattacgcatagcaaatttcattcaattagaggcataatcacatatagagcaaaccatcacaggaaacaacacattgattcaactattgggctaatagaagaaacagggtgaacagaataggcactacacaattctgcagcaagatgttgatgtgattgaggcataaccactgcaaaaattctccagattttttatgctaacatgtagtcaactaaactatgcactctagttgggtcaaataaataaataaacactctagtataatttgatttttggtagtagtctatacatgattaaaccggatcagacatgccaaatccacctccttcagtggccccgagtcttctttgctcagattcaatcacgcgtgcaatcgggttcgcatagttgtgaaactgcgacaattcacacccaaaaattcaactatttctctattataacaataagcaaaacacgcatcatcatgcaatatttacaaccaacattataacgctaagagcaaggattgaagcaagtccatcaaaaaaattaaaacaataaacttaaaagtagagttcaagcgaaagttgtattggctaactttagaaacttttaaattttaatttttctttcatggaggaagtatgggtgcaatttaaagatttttaaaccaagcatgttgattagatcacgcaggtttcaagaataggataaatggccatttaccgcttcaactagctcttcacatttgcgcactaacagtgccactttaacagctccagcttcttttactgttataattttactacttatggcatcgacctgtcatttttgaagataagaaataacaatttattctttcaccaaatataattgatatatcatgaaacttaaggaatgccacctcagataaaacagcctcgacatttctctgccttgtttctgtaacagatctcttagattcaacatctgattttgtactacttaagtatttagttgcttcttcccgcataatattgcactctttctccaattgcttccatgattcttccatctgctcaactaaggagaaacaagtcgaaaaagttggaggtaaaacatgctagtaacaaatattcatgcttaaagagcagttatatgtggcatgaaagtttccaacaaaaatcattaaaaaaataatgtggcgtacaaatgtgctggttttcaatcaccaaatgctgttaaaaaggaaaacaaaattattggacaaaaatcatgcaggttacttgtgaacaggttttacagaatgtgtttcgtaaaaattatcattactcattcttaaaccatgtagccagaaatggagacacagcaaggcttgcacaagaacatacctttgctctgtttttcaaccaatttggcctcaagtgacttctccaatatttcttcatcactaagtttagccttcaatgctttaagatccttttcaatagatttagcagaatttacctatagaaggcacaactgacatcaaacaaggtttgcacggtaataatctttgaagtaatgtgaagaagtgcttcttgcacatgagtctcaattgagaaatttcacaagaaaaatgttgtttccattgatgttgcaacaacatcctctgctcctctgatttctaatttggacactgctcaagttaatttgaacactgcttaagctaattttgtgcaacagaataagaattctatttctaatcagagtcagtccacaaactactcaaacttaaacatatctgaaagtaaatctgagagaactaaattgaggtgaaagagtattgtattcaacccaaagagaaactgagtccaatacagtttatataacagttacagatatgtaactgtcaactaacttgagtgtcagtcaatttgccaaagataactctgtatattttgaatttcatcctaatgtttgcttggtgaaatctcaggtctccaattctcaaaggaaatctaggttctgatgaactgtacaaatttcccagtttgctgtcaagttcttcatctactgtcaagacaggctctcctaggcctacttctatttttcctaattctgttgtaaattctgtctctgtaaaatccattaattcaagcgcttggcactctaggttaggccattctagtgttgatgttcagaaaattgcaatccaactttgtaagattccatttatcaataaaactgagcttgactttttgttgttcatgctctctaggtaaagctcacagattacactctccctcttctctcacaacttataatcaacctcttgaactaattttcagtgacctttgggaaccagctccctttgtttcctatacagggtatagctattatgctacttttgttgatgcctatactaggtatacctggatttttctgcttaaaacaaagtctgaaacactatatgttttcaaaaagtttcaagctatggctgaaaggcaatcaagtctacctattaaagctgtccaaacagactggggggagagttcagaccttttactgcctttttacagcaattaggtgtaactcatagggttatttgccctcatactcatcatcaaaatggtgtggtagagagaaaacatagacacatagttgagcttggtctcactcttttagctcaagctcttcttcctcttacctactgggatcatgcattcttaaccagtgtttatcttatcaatagacttcccacctcttcccttaattttgatataccctttgtcaaattatataaacagcaacctgattttcactttcttagagtgtttggatgtgcctgttttcctctcttaagaccttacaacaaaaacaagtttcagtttaggtcccaagaatgtgcttttctagggtattcacctggacacaaaggatgcaagtatctttcctcagatggcagaatttacatctctaaggatattgtttttaatgaatctaaatttccctatcctaacctattttcatcttctacttcttcacactcttctttagagtctcatgttcctatcaccactatccctcttgtgtctgtacctcccacacaattacataactcttcctctgttgcttctccagccagtacctcacaaatttcaacttcttctctacctcaaaattctgtctctcactcacagtcatgtcaacctgcccctcccctttcagttgacactcacccaaagcttgacactcaaccagagtctcaatcgtctactgctattcatgtagatgagtctcaatcatatactgctgtaccctgcagatttttctgttcccagttctgacatacagcaactaccactcattccctctattcctcaaaatactcacccaatgcaaaccagatccaagtctggaattgtgcaacacagaattcatcctactcttcttcttgctcacatggaacctaagtctaccaaacaagccttggctgatcctacatggctagctgccatgaaagctgaatatgatgcattgattaagaatggtacttggtcacttgtttctttgcctcctaacagagttcctattggctgtaagtgggttttcaggattacaaaaatccagatggatcggtaaacaagtacaaggccagattggtagctaagggatttcgtcagcaatatggaacagattatactgaaactttctcacctgtcatcaagcccatcacagtgagacttctcctctccttggctgccacctatggttggcctcttcaacagttagatatgaataatgcttttcttaatgccattcttgaggaggtgtatatgcagcaacctccaggttttgaatcttccaccaaatccatgttgtgcaagcttcagaaggcaatctatggtctcaaacaggctcctagggcctggtttgataaactaaaggagattctactgaagtttgagttcaaatccagcaagtgtgacccttcactctttgtttattccaagggatcatccacaatctacatgctagtatatgttgacatcataataacagggaatgatactcctttattacaacaactcattctaagctaaatacagtattttctctcaaagaccttggattacttcttaggaattgaagtaaagcatctatcagatgactctattgctctaactcagcaaatatattagagacttactggccagaaccaacatgtcaaatgtcaaacccatctcttcccctatggtaactggttgtaaactcactaagtgtggttctgatcctctttatgattgttatatgtataggacagttgtaggagcacttcaatatgctactataactagaccagaaataagtttctctgcaaacaaggtctgcctgtcaattcatgaaggagccccttgaacatcactgggtggcagttaaaaggatcccaaggtatattaaaggcactctctcatgtggtcttcatctaaaacatgcttctgccccttttttcatcaatgccttttttgatgcagattggacctatgatcctgatgacaggaggtccacatctggtgcttgtgtttactttggatctaatctaatctcctggtggtcaaagaaacagtcagttgaggctaggtccagcacagaagcagagtacaagagcttggccttggtcactgcaaaggtgtcttggcttcagtctcttctaactgaacttgctgtcccacacaagcttcctgccatccattgtgacaacacaagcactgtatctcttgctcataatccggttcttcatgctcataccaaacacagagttagacttattttttcaagaaaaggttctgtacaagctgctgtgagtggtttatgtgcctgctataagtcagtatgctgacattcttaccaaggctttatctttggggggggggggggggggggggggtattagagtttcttactccactaagtaaaatgtatcggttttttacttggtggaaattgtcaactgcaatctgttagtttgttagatgttactaactataggttctgttgacatggacctttgtaacttggcttgatatttttctaatcaatttctatcagttttacaatttctcaatttctatcagtccataatagatttcatatctctaactctaagacagcattccaattatgagttccatccaaaaaatttataaaaaaaaaaaaaaaacttcttgccacagtatacatggtgaattgatagtaaattttcaatcattatgataaacaccagagcagatgtcaactaacaagagtatgttaatacctgttcttgtatatcctgcatcagcttgtagtgttttgacattttcttgtacacctaagaaaagataaaagataaaaagatctaaattcaagaacaaaacatcatgaatttatccatgagttacagctgtttacattgtagctttccttctgaaataatgagtaaaaaaatgtccagaaaatcagtgcataaattattcaagtattgtagatatgacagaatgaacccacagtatgcatatcaaattcaatcagtcaatccacattggcatttgatcttccagtcaatattcaagggacgatttggcttgcataagcccaatccagcttcagcaccaactaattgacaactcagttgatacatgtgccataagactcactagctcaaggcttcacaaaatttgaatttatgatgcaaattgcaattgcatcctaaagtaaatctcgatggaatatttggttggaagaaaacaaaatagagtgaaagtaaatacaaataactacatattttcttttgtttgattagagagagaaagtgagaagaaaagaagttcaaaaacaaaaattcaaaacttccattttccttttaatttcaattcaaaatctccaatggaaaatttgtgtatatgtgtgatgatataagatcactttaccatgaccaaaaaggataaaatgcagatgaaagggggataaaaaagacccagtctttgacaatgtaccttggaaaaaacttcaacaagggcagtcttctcatgaaaagcttgcattgctaatctttcagcattccttgcctcctcacgagctaatttcttttcctctaaagccctcttcatggaaaatcagagataaaatttacataagtactggcagagaaaaatgagccaatgttttttccaaaactagtatcaggtcaagttgtggaactaacagaaggaagatagtccaataatctccaatataatattcacacaagcagattgtttggagagaaatgcaaagtatgccacatttttgtagctaaaaacataaataaaaccaattaactttgattatgcctacaacataagagcaaataaacaacataaatgaattgggattgctagctacaagggagaaccacataaaagaggggaaaaaatacctgtactttatcaggtgattgaccgatttttgaacgtagatttgcattttcttggacattttgtaccaatgtaaattcagcatttgaaatctgggatacgaaaaggaaaatagaatgaataagaattcacataatccatgcatcaaggagtcaaattttcagaaggaaagggaattgatgttagttagtagacaaagaaaggaatctcaatctccaaactaaaaacagcgctaacaacagtcagaccacaatgtaatatgcacaagaataaagacctactcatcaaaaccaaagccatgtccagtgtctacacaaatgaggaaacactaatatccaacaaaatataattaatctgattaaacataaatttccaattgtcacagcagaaaacgaacaccatgtcaatccattattggcgaaagacaatcactgaccttctcatccgtttccccggtcttctccttcaacttcctcaaagtacttcttagagaactctggttgctgttcagcaccgcaatcatttgcttgagctctttaactttggcctccacctcctcaacaagaggcatctccttctccttcgcctcattgcattccgaaatctccgctttcaactaaactcagcaaaacacacgctcagttaaaacctcaacgagtttgaaattgagattgagatgagatcccaatacaaacctgcaaaatcctattctcctccaactccgttcgctgcgcctctagagcgttcacttcctccacaatttccgagacggagttcattctcgcgtccctgagataaaaaataaaaaataaaaacgattaggttttctcccagcgaggcaataattaatccaagaggttaaaagagagtgacctatcgagacaaaaattgagaagagagccaaggaagagatcggttcggtgaggatccggcatgagaagatcggcgagggtgaatttgcgcggacactcgagtgttgtgagaacctcgttgatctggttgtagagtttcacggcgcgaacggaatccacgtggaaatcagggttttcaagatgctctagagcgtggaactcgagttgctcgttgtcttccctgcggaaaatgaaaagaataagaatctgagcgaggaatgtagaatcgaagaaggtgcgaaaagagaagaaaatagaaagagagagagactcaaggagaatgtcgagatgaatgaggacgcgagtgtagagatcggagatgaaatcagggttagggttggtgaagtcctgctccgtcacgttcgcgatctgcaactgcgctaagattgtgactatttccggccgccggagccttgggtactcgtaattcgactccgccattttcttcttctccaaagtcaaaacgcaacctctactcgagagaattcgggcttcgactcatacgagacgagactataagtacaaccgcgaaattgaattaaattgaaaacaaaattagtggccattttcccgcccagtactttcccatggaggctgattcaacaagttctcccaaaattacaaggaaaatactaaaattggattattgcaaaatataggggaaattgtatttagccttatgctttttttaagaggtaaaataccactctttttattctttgaatgagataaattaacatattgtatgatccataaaattaagtgttttttcaataaaaatgaatttatttcattttattcataataagagatgcaatatatgttagaatgtaatcaaagatattaatgttaatataggatcttgttgaattggcaagaaagttgataagatgatttgaatcattttaatgttttgaataggttaattattttaatatttgtcatatctcatggtttaaaattgtcctattatttctaataaaaatcttttgttttgttagagaaaaaaagtaaataaaaatccaacacatacaattttttataacatcataataatgtgtaagtcgttaatatttcatgcatactgattttataattatataataaattttcacacttttttatatgaaataggctaatgggacaagttgagcttatataaaggcaaagtttagacctaaaaataagctgatgacaagtagcatattcaaactttggacataaaaatataaagtaggtaatatccaacttaagtagaccctgactcggctcaacccttgcctccttaccagactaaccagatagtttgaaaaataagaaagcctatatttacaagctgaaataatggtgtcaatttcagtgctggatggaacgtcgttgttgaaaagcatccatgacggtctcgcaatctaagtcaatctcaatgccagtgactccaaagtctgataggtaactaattgtctacatgaaaccaatatccttcaccttttgagctgggagaactccattgcacagataaatttgaatattgggccataactcagtagccaaacaaacactaataagtaataacattagggcatccaaagaaaacgtgtcagtcgttttcaacacttgattcgcaattaggacaaatattcgggcaagagacacccttcgcgaaggtagacaaccccgaagaattctccatagaatatgtttgattttaggaggaatattcaaacgccacaattgtatccaattactaggaagtttcaaatttctggtatccatagttacctccatgatgttgtggtatgcggatttgacctgtaaaatctagtttgactcaagtttcaaataagcttgtcattttttagtataaaattaagttaaacaacattaatattagaataaatttatgtgtggagtttttaaatctatgtgacattataggattcataaaattaaaataagcaaccctatttaaacaaatatgtactgtggaagcacttaaaagtttatcttaaatgagagaattttagtatttctctaattagaaaagtgatacctgttttctcttctcatcagaaagaaagtatccaaattaattctctcggttttgatgtctcggccaggtcgttgatgcacctaaatccccttattgttgagttcaattcgttgcttgttcatagtttctttctttgattagttatcttcaaatacaaagacggattgagggaagtcctcgttatattttttctccactagttcacaggtaaatacatggcttactatgaatttgtaactacatgttctgatatttaatttgttgtaagataaacagataataattatatatatatatatatgggtgtgtgtatgcgcgggtccactttttgagtgcaagagtagtcttaaatcttaattatagctttggacgtactagatatgaaatttctaatattgattaatgattagattaattgcatgatacagaaagttaagaagcataagttaagttccgtaagtttagctaagggaactaaccatgtatctgcctagctttgagattatcaacctagcaatactagtataacttttcgtttttgtagactcacaagacatgaaagttataattttatgatgtacatgtaatcaaaccggctaaatatatacgttctcatgaatgcctaattttatttcaataagtgtttaaatatctatcacttctgtaaattaatttttgtgttggagtggtttatttagcattacaatttctttaaaacaagtgacactactaatgctttatgatcatgagcaaagggaagattaaatcagtggagttggacttaacaccgaagacaacagaagcattgtttgagggagatggtggaggttactacacttggtcaagttctgaagtgccaatcctggctaagaataatgttggtgcaggtcgccttgtgcttcagcctcgtggcttcgcccttcctcattatacagattcatccaaaattggttatgtcattcaaggtcagacccgcgcgtagatatcatcatatcttttctattttttaattttaatttcccctcccatttctattacaagttatacatacgagtttaatttaatattcacacacttatgagttatgacataccaacgagtggttggtttgaataaaattaggcttagaatttttaattaagattttattttcgaacatatatagacgaaaaatatgtaattaacaaaaaagatctcattaaaaacaacagtcaattaaattacaaaaatatcattattgttgtgaattagtttaattttttttccttttttaattagtgacatccataatataatggtattatgcattgaatcgtacgtgtaataaacttaaatgactcgtggtgttagttttcttagaactttggtgatcatcactgtctcctattaaatttctcaattttatggcacacatgcatgcagggactgatggcgtagttggaattgggatggtactccccaacactaaagaagaggtggttttgaagcttaagaagggagattttataccagtgcctattggagctgtctcgtggtggttcaacgatggagactctgatctcatgcatcattgcttttcttggagaaacttcaaaggctcttgttcctgtccaattcacctatttctttctaactggggctctaggacttataggaggcttctccaatgagctcacaagcaaagtatatggtttggacaatgaggtggaaaagctcataaagccaaacttggggttttgatcatcaaactagacataagtcaacccatgccttaagccacaaatgaacatgaacaaaaagctactctataatatagatgctgcacgcccagaaaatgttgtggaaaatgctggattagtcaaaaccttaacggagaaagattttccttttattggggatgttgggttaagtgtgattagagtgaaacttgaaccggtagcaccctcatacccaaccaaccttacggttcagttgatttacattgccagaggagaggtggcaagattgaaattgtggactttagtggaaagagtgtattaaacactcaagttgaggctggtcatttgcttgtcgtgccacaattctttgatgttgctgaaattgcgtgtgaagaaggaattgagagttactccatcgtaataactataaagtatgacttaatttatacaaaatatattcatttaatccaagaagtagcacatggcatgcaatgacattaaaaatgattgattatattactttaaaatatgacatagtataattaagtgttaacaaaattaacaaaaaaatgattgattatcttatttacaggccattgtttgaagaattggctggaaggggatcaatttggaacgccttttcgcctacactgcaacaagtgtctcttaacgtggattctgattttcaaaagtttttcatatccaagatcaaggaatctaccaatctcatccctcctactgtttagttcgatgcgtgtgatgtacgtactaccgtatttgtttatgtataattttcagatgatgatattgatgtaagataattctgaacttatctttctaaaagttatgtcgttgtattgcttttgttttaaagaaaacattttcgtgagaatacttatttaagttttctatattgagcaataaatgaatggaaggatttgaatgctagtctataatatagacgctgcacgtgcacaaaatgttgtggaaaatgctggattagtcaaaaccttaacggagaaagattttccttttattggggatgttgggttaagtgtgattagagtgaaacttgaaccgggtgctattaaggcaccattataccctacgaacactgcagttcagttaatttacattgctagaggaagtagcaagattgaaattgtgggcttgaatggaaaacgtgtattagacactcaagttattaaggctggtgatttacttgttgtgccacaattttttgtggttacccaaattgcaggagatgaagaaggaatggaaagttactccattgtcacaactactaagtaagctgttgggattttatataaaataatttttatagcatgcaataacattaaaaatggttgattatatattatttgagagtatgtcccagtatgattaattagtactactaacaaaaatgtttgattatattatttgtaggcctttgtttgaagagttggctggaaaggcatcaatttggggtgtgttgtcatctactgttcaacaagtggctcttaacgtggattcagaatttcaagagttgttcgtatccaagatcaagaaatcctctaatctcatgccacccacgtcctactagttagtctgacacatgagatgatgcatgcgtgtgaatgtatttgttttgtaaaattcagatgatgttatacatatgagaaaatactaaatttatctttctacgtgaaaattcttagtttgatgttgattcaagagacagggatggagaagaagtcgatgtgtatgtcattgtattgcttttgttttcaatttaaaggatatactttggtagcagtaaaattctttatatatgttctgttatgaacgaaaagtattcatgaagctagtgattataattaaaatgtttacatgtatggtcttacattgcatagtggattagagtgtagaattgattttgagttaaatatttttagataatttttatgctaaagataaaaatttatattgaatttttcaataataaaattaaaagtattaacgtacaaatcacttcatttcaaaattttaatcaatttcttcaaaatcagtctagacttctcacacaaattaaaatgaattcatccacttcatcttttgaagaatttattgagaaagtttatataaaagtaaaaggcataaattttattttaatttatagagaaatttaatttatttttttcttttcttatacgtttcatgttagataagcttctttaatttatgaaacacttatttggaagaaaaaaaataagaaaataaaatatatttaacttctctatatataagcttaattaactattttaggaaccttagctttttagaaaaatcaaatgaaaataatttttataaaaagtaaatagtacataattaatttaaacttatataaattacaattcatttattttgtatttttttctcttataattatttatgaaaaaatttattcatataaaacttaatttcttataaataatttcatctaaacaatatacataacttatatgtttcaatgtaataaaatttaaggttcaaaactcatatttgataaggacatgcggaaagtgcttcttagaatagacataacatatatgtttctcatttccttttattataataaaaaatttaaatatttataatttacttgattaaaacatattactacttaaaaaaatttgtattctactacggtgaaataatgacagttttccaagaaccatcttaaattcgattacgacttcaatgatgacaaatttacaaaaatcatcttaaaaagctgcgttccataatgattttttgtaaaaccgtcgtggtttcatttctcttccagcaaaaacgaaaacgctcgccactcaatcactcaatcactcaaactcacaccagcgtatagagattagagagagaaccctaaaattcggctgccgcgatggacatgcatcgacgacgacaaagacctcaacctcgacctcggcgacattgatctcgacccgaccaacggaatcatgcccaaccacataagcaagttttgatttcatttcaacttcatctttcatcttcttcccctgtcaatctagccactctctctgaatttgacggttgtgccgcatagtctcatcagtttctcacttgctcgctcagtgactcgctcactcttcttcagatttgatcgaagaaagaaatagaggaagcactggaactgtcacgcgtgaaggacacgaaggagaggatggcaggtgtggagtgcctccaccaacttctagaagcttctagaaagagcctatcctcttctaaggtcacctcgctcgtcgacatatgcatggatctcctcaaggacaacaacttttgtgtcttccaaggcgcgctccaggccctcgcctctgccatcatcctcgccggcgaacacttcaagctccacttcaacgccctcctccttgccgtgggagtagcagagggtgttgaagtgtcgacaatgcactcagtttgtctctcaaacttagaattttgaaatataattaccttcaatggttttgtgagtatatctaagatctggtcttcattccaactcttaattatccatcattacttgatgtctcaagaaatgacatcgggtctctaatatatttactcctccgattgaatagttggatgctttgccaaattaattgcttatttgttgtctatccgtagcttcataggtcttattgtttccaaattcatctctcccaacaaagtttcaagcttggcagtaagacagtgccaccatatactactttttgaaacactaagaaatgtattatgtatccattgcatttgcagcacatgaaaatataacaagttgtattcttttgatcatcctaatctccacaccaaccaaagtccatacatccaatctttacacttctacactgcatctcatttgaaaacagcaacccgaaatcaatcgtccctttgatgtacctcagtatccgtttgtttgttgcatagtgagatgttcttggcttctccttaaatctacttatgaagccaactccatgccagagaatgatcacactgcattcatcacatcaacttcttttttatacatttttcatcacaagtcccacatcaaccaactaatggagttggttattgataactggtaaccactattaaaagtaggatcttggtaacctgtgacataaaaagccttaaagacgttgtgactttgtgaacacaaagtcaaggaaacagaggcttgcattaattgcaactattctaattcaataaaatgcatgttgcttctcatacaaagacaatcctccaccatcaaaagaagcaaaccagagttaacactgactaaataaaacaaaacacacatacatgcacgatccaccttaagaatactaacttcaatgttacattggcattttattacacaccactgcaaatttctttttcactggagacaattttgttccagtaagataggattataccttcgagtacttaacacatctgcataaccaaaaccaagacttaaaatcgagacctttgattaagttggaccaaccccacgccaattgatccacgtgctcggtggtacaccactgcgaatttcattcattcattggttgattcatcccattgatcctctcaattacagagataatcccttgcccgccaagcttcccctgcctattagccactgttctgtatagtttctagaacacaaatgtacagcacgaaagcgctgtatgattactgtttgatcactctaactccgcaactatgaagatatcgatggtgaacgatatcccacagttgatgatcactgagatacacgaaattggggtgaggtgtgtgctcagtgtaattgaaagagagagagagctagagtgtgtgtaccttttaagcgcctatacccgtgtatttataggcacattaccttgcggttagatactccaactgcacgcgcaatactccctatattcttggcctcaacctgcacgttcataactgctccagtagaccaagtcatagtccacattcattgaatctgttaacacacgtggtattaaaggaaattgggcttcgatattaggcccaactattattccataacagttgccccccagcccgagtatcaagttgccttgatggtcgggatgtattatgttaaccgcctccgaccatactaccaaactagtcgtctccgagcagaaaattaatctgaacagcttcatccgagcatcgaggtccaaataaaatcccgcgtttattataaatcggccaggagtcattccgagtaaccaagtaggatctccccagtatatttctttggataagtactcctggtcggttaatctaatactctagtttatcacatcaattatccgaacagggcaatccgagcaggaccttttatccgagctcttgactgatcgtactttgttgagtagggtttgtccgaataaaggcttattttgctattcctttaggtcgcacttgggtggaaaaagtaaatatccctcgagtggcgactggcctccttgctgtaggatcagttactattcccatcattaatggcagcttgggcattaaagacctgtcgtttcattccctttggtaatcattacgaccctagtgtttttactttcttgcccccaaatcaacacgtccttttaccgttctgtccttgcgtcgtttcgttttgtgagtggcggttcatcaggccgttttgttttccttggcggttactgtgggttattattgcatttcaaatttatcctttaatttctggacctccttttctttatattgtctgcattccttctttcctgagttttccccttttctctttcttcttttgaagctttcgcaaacttgcctcttcgtcatccctttcgatacaccgctattcttgctaccaggtacctttctttctttttgctatttttacttgtgcattctgttgcttgcatttctgtaagggtagtgttgctttattcttttccattcttggccgctgtcctttcctctgttcttgtatatcttcatgaaatttactcctgaggaagaggcggagttgcggcggagggcccctagggcctcgtggttgttgtggggtcttcccctccccgatggaatgagcgagaccgaccctttgcgtggtcataccggaggttcttccatctctaggccacctaaaacctccgccgtgactctcccttcagaccctttgttgccacctatccgccaccgcgagtctgactctcgcggtgttcctccaccttcttctatctcttcttctagaaatgactctattccgggtactagtcatcctagggctcctcccattttgggccccaggacatctgggcccacaaatgcaatcagcccaacaatctttcctttgaaggtctcttgtgatccacttgacaacctgtcgtcctcgtcttcggacgacactctttcatcatcctcggataaaatgatgactttttcatcgtcctcggatgaagtgatggaagttcggtacgatgcctgcattaactgtgtttctgatgccgtgtaccatactcagcatggttctgatgatatcgccgactccatcttgggattatgtcggcataaccccatcttctcatccgtcaaaaaacccaaccgaggccgtacaccaaatgcatggttccggtctcgggctcttctgcctttaatgcgtcatttccaggtatgtgtactaactctggttctctctttatattttggtaggtataatggacaattccgtggaggttgtggatgaatctctgtctgccgagtccgagtcgggcgcggttcctgcgttggcctccatatttcattgggttacctacgaaattcttagaaccttctccaccctcgaactatccactatagcctcactccccttaggtaaacaagacgggtttggggtccgggctccctactcgggtgagcccatttgtgcccatagagagggcaatgatcccaacttctttttcttctacgagggggtagtttctcaaatagggtgaccttccccttcacctcttttgagatggacgtattaaaccatctccgaatagccccttctcagcttcatccgaacagctgggatttgtgaggaccttcgaattattctgtgaagagcttcggatcccctgtacagttccactctttttttattattattacccgaacactcctaggacggggaaagaaccgcccgagcgtaagggatgggtcgccctgcggagtcagaataagcggaaattaattgttccgtttacagagtccttccggggatttaaagataaatattttaaagtcgcagccaatcccgggcagcgaccattttttctgcggggggatgagtctgctgacgtagagtggtcgtttcccttgtattggtcgcaagaccattatcaggataaagctaattataagttcatcgaagagtcattgtccgatgctgaagcctctgccatatctgtgatttcggagtatctcgacaccaagggccgccccatgcggccgtttatgtccgccgtgctcgcggcagttcctccgcttaccgtaattatagctctcgacgagttttgttcggtatgtatcttgaatgttatatctgatgtgtccttgtttatttcagtgaacatgggacaaccagctggttcagccgccaccgacccgaagccaaccgagcctgcaaataaagctccacaaaaagggcaaaagcgggtcctccctctttccgggcaatgttggagggagaaataaaagagctaaggttcagaaaaaatttgttgctcttagaccgtctactccaacggctgctcctcgggggatcccgtctgcagtcgtccccgtctctgctgcccgggaacgtgcttccccgtcgactgccgccttgcagaatgagcgagctgggtccttagccgcgacggggaatgtttggagaagggggtaaccgaggagctggtcaagcttaccaagcctcccagttatctcctcgaaccgggtgcccccgtgggagacgagctcgcggcattggttcgcgttgaagagaacgcttatcaatgcgcttctctagtacgggcctttgccactgttcggcacaggtaagtattcaccaacacttcatctgtattcttcatttttcaggttctaattgatttaatgtagatatggggtggcggtagaagagaaaaagaaatccgaccaagctctcatggccgcccggctgctcatggagaggacaaggaaaggtcttccgctgaaattaggaagttgaaggaggacctactctccgtgcaagccatagcggcgtcgctgcgagcagatctggggcgtgcccaaggtgacctcgaggcttctgatcagaagatagcgatgttatcctccaccatcgactctttgaaagccgagcacgaggaaaagctttcagaagtgaaggccgcccttgctgttgccgtcgaggactctttcaataacaccttagatcaagttaagtttttgaatcctgatgttaacctttgcacaaccgggatgcattacttagcttatgtagacgagggccgtttggttcccccatctggtgctgaagattcctcgatggtagccgccgaggaggcggtacacgtagatgaagcttcttctggtgctgcacccaccgtcctcgcgccgcctcctacagatcccgttcctgtcaccgaggatcatcctcaacaataaagggccgggatgccggtttaacttgtattttacttgtatttatttttctttgttgggcccggtgcccggaacaatttaatttcctttgttgggcctggtgcccggaacaattgtttaacttggtatatatttctattttcaagctctctacttgattcgtaaaatatcatgtgcgcacatctttttggttccaacgaccacatattcgaatgtattttttatttcgtatatatccgaccacaaacaactttgctaacgaggcctgatcagagccgggtagcatatcatttatagccgttatcacactttgaaatcgtcatgactcaaaacgtataataaaatgtttgcattgataatcgttgttacaataatatgtatgtccgagtaccgggtagggtcggatcgatactttagtcaacgatacaatttattcaatgataaacataatgtgctcggaaagcaatgtttccgagtgaacaatttcctaacaatgtcttcatcgtgaaaaaggaccgtatggactcggattactccgttccgagtccttaccctcgataacgaaatttcattgtcgagctgcctcgtacccctgatgaataaggaccatatgggttcggatacaacaatccggacccatacccctattaaaaaggaggtcgacgtcgttagctgtaatacttcttcaacttgtcagcattccatgttcgtttgaccgtcttgccttgtaatgtttccaacgtgtatgctcccttgtctagctttttagtgacccggtatgggccctcccagttagccgcgaattttccgtctcgggcattcttgtttccgatgtcggcacgtcgtagtaccagatcggtttcttcaaattcccgcgggaccacccttttattgtaggcgcgtgccatctgttgtttcagtttcagttctctgtcgtgcgctgctgcccggatctcctcaacgactgtcgactccaggctaatacttcattatttgtttcctccccggcttgcaatgtctgtctccgtcgccatgattgctgtccgacctcgacggggatcattgcttcgtttccgtatgtcatgcggaatggtgtctcccggttgatgattggaccgaagtccggatcccccatagacataatataattgttccacccaagtcgatccggcctcgtgcattcgtttccgtagggcctccagaattgttttgtttgcggcttcagcttggccgttggattgggggtgctcgacagatgcgaaccggtgtcggatttggaaattagccatcatctcctgaaatcctctgtcaatgaattgggttccgttgtcggtaattatttccccagggattccgaaacgggaaattatatttctttcgaaaaatttctgtactcgggccgacgtgattgtcgttgaggggctgcttcaatccacttggtataataatctacagccactatcagccacctcatctgtccttccgccggcttgaatggtcccaacagatccatgccccatttgtaaaatggccatggcgccgaaatggactgcaattcctccggcggggataaaatcctggtcgcgtgcatctggcagctttcacaagatctcacgtgatttgtggcgtccgcactcattgtcggccaaaataaccagcccgtaacgcctttctcgtcagtgcccggccccccatatgctgtccgttgattccttcgtggatctcggataggatatagtcgactcggtttgggccacgcataccaataaaggctatgtaacccccttcggtataattctccgtcgaccatagtgtacatggccgacgttcttgtcagacgcgggcttctatatcgtcgtctggcaagattcctctttccagaaaatttactatgggtcgcgccagtcctggtcggaggtaatcatcattacgcacgtcggctgcatcgtttgctgttgaattactgtgcggttgttcccgggctttttggtgctcgccaatttggacaggatatccgcccgagtattatcttctcgggggatgtgactcacagaaatgtcgtcgaactcggacatcaattcttttactcggctcaggtatttggccaacaaaggcccctttacctgataccgtccttcaatttgtgatgcgaccagtgggagtccgtgtagactttgacgttacgtgcctcctgctctttggcctgcacgagtccggcgatcaacgcctcgtactcggcctgattgttcgaagtcgggaaacctagttgtagggatatttccgtagccactccatctgggttctcgactataattccggctccacttcctttcttattggaggacccgtcgacgaacagggtccaccatcatccaccctcggattatgaggggtgagttctcggacgaagtctgccagcgcttgggacttgatcgcatgtcgagcctcgaatttcagatcgaactcggacagttggactgcccaatgggttagtcttctgccaagtccggtttgtgtagtacctgccggattggctggtctgtccgtacaacaacagtgtggctctgaaaatacggtcgtaactttttggcggcgacgattaaggcaaaaacaagtttttccaacttctggtacctcagctcggagtcgcgtaatgctcggctcacaaaatataccggcttctgtgtagtgtccacctctcttaccagggctgcgcttactgcttcttcgcctaccgacaaatacatgaccagcacttctcctgttttcggtcttgataatactggtggcgacgataacgatttcttcatgtcgatgaaggcggcctcacattccgggctccattctatgacggcctgcttcttcaacatcttgaagaatggcaatgccttttccgctgacttcggcataaatcgggtgagggcggctatccgacccgtcagttgctgaacctccttcttgttcgtcgggaactgcatgtccagtacagcgcgacacttatccgggttggcttctattccccggtgtgttagcatgaaacccaagaacttcccggctccgactccaaaggaacattttaacggattgaggcgtatgctgaatcgtcgtaatcggtcgaaagtttcttcgagatcctcgacgtgcttattgatatcttcagatttgacgatcatatcatcaatgtagacttctatatttcgtccgagctgtggttcgaacacgctgttcatcattctctgatacgtggcccctgcattcttgaggccaaacggcataacattgtaacaataattggccttgtcgccgatgaacgccgttttctcctggtcgtctgggtgcattgggatctgattgtatccggaaaatgcatccataaacgataatactctgtacccggatgaattatcaaccagctggtcgatattcggcatgggataggcgtccttcgggcacatcttgttcaaatccgtgtagtcggtgcataccctccattttccgttcggcttccgcaccatcacaacgttcgacaaccaagtggtatattgaacttcacgtatgaaacctgcccggagcagttcatcaatatgggcccgtaacgcctgtgccctctccggccccaatttacgttttttctgttccaccggcttcgatcccgggtacatggctagtcgatggctacagaaagctgggtcgacgccgggaatttctgatgccttccacgcgaatatgtcaatattcttcttcaggcaactgattagcctgtcccgtagctctggtcctaagtcccccccgatgttagtcacctggccggctgaatctccaattacgacctgttccactttctccacgggttctggccgccactcgtctggggcttctcgcatatcaagctctacgacattaacagaacgtactcggtttgatccgttgtcgtcaatatctttctcgcttctacggaccgtgtcgtagtaacactgccgcgactctttctggtcgccgcatatggtcaccacctgtttgttgttgcctacaaacttgagcttctggtgcttggtggacattaagatgtcccacctgtgaatggtcggtcttcccaatatcatgttgtactgggatggaaaatctgccacgacgaactccacttcttcggatttataagattctctcgttcctagtgttagacgcaggcggatggatcccatcacgcttgtgttgccgccattaaaaccaatgagcattgtcttgcaaggctttaagtcttttacgtccaacttcatcttacggaacgcagtcaacataataatgtcggcggaactcccattgtctacgtacattcgtcttacccgacagtttcccacggttgctgatatgaccaaaccatcttcgtgtccgggtactactccctccatatcctgctcggtaaagtataggagtggaggttctggctttccggcccgggctttgaatctaggttgtgcctggaccgacaatacttccttcaagtactttttccgttgagtggaggtgtcgccgccgccgcccatacctcccgagattacattgcattcaaattcgggctccgggaactcgtcattgtcttcccggggtttctttccttcttctcttcgttgactttcttctcctttgcgtttattttttcgcccctgtgttcggatgacatactgcttcagccttccttctcggataaacttttcaattgcgtcccgcaagtcccagcattgatcggtagtatgcccgggcccgttatggaactcacagaagcgtgacttatccagtccagccttgttgaacacagggcgagggcgttccactttcttcatttcagtgaatgcgacttccttccaaatttgtgaccgggacacgttcagtggagtgtacttctcatatttattctcgtatcttcctggccggggcttttgttcgtgattccgagtacgattctccgggtaacctctattttttgggggcggacttctcctatcatgtcgctcctttgttcgtccagggttgttgacaacctccatttgttctagctccaagtacttcttcgcgcgagcacggaattccatcaacgacttcaccgggtctttgtatatagacttggcgaatctcgacgaaccatcgagtccagctgatatcaaatacacatggactctttcctctaatccttcgacttgcagggctgcctctttaaacctatccaaatagctttgcaaggtctctccgggtagttgcctgactttccccagcgtgaactcggacttcggctgctttttgctggtcgcaaaattcaacaaaaacttctgtccgaagtcttcaaagtttttgatcgacctaggcggtagggtgtgaaaccacgtctgcgccgggcctgtcaatgtggtgacgaagatccgagaaatgatgggctcgtcaattccccggacgcacatctgcaaatcgaattcatcgatatgcacttgtggatcctgcgtcccgtcgtattttgatagaaaagatccatcaaagtcgtccaagtatcgagctttcacaatgtcgtcgacgaaagggctgttgttctgatgtccccgactgttcttccgacggtatatgggtcccgtcttttgatagaaagtctgttcgcccttcttgccatttccatcttcctgtagaactttttcaccattcattcgtcgactagggctgtcatcggggattcgtcccgtgccgacgtcatcacatgtctcatttcgtgcccggattgggctccgacctggctcatccgttctcctgtggtcttctgggtcggcgtcgcgtctctgagttatttgggtcctcaggtccagtggctgttctgtccgcctttggtcttccggatctgtactcctccgctggttcaaccgtgtcctcaaatcctgtgtctcgccctcaggattcgacgactgtgtgcggttgattaaggtttgtaattgctgctccaattgtgccattctctgcatctcggcacgtctccgttcttcattgtgttcctcgatttgacgagtgatgtttctgatgtcgtcttgtctctgtaaagtctgtcgcctctccatgttctcaattcgagtcaaaatcgaattgaggacattgccgactagctgtcctccgagctcaccctccggatacgttctccgtgtgactggagtcctctgctgatctgtttgggcgggcgaggaagcttcgtcggaaacggcttcagtcacgtgtacttcttctcttcgtgccacgttctgactctccggtaggaagatttccctattcggcatctcggagcgcggtacggaatggctgtttcttgtgttaaccattgttgcaaggtgtgggactcgaaatttatcgtccccacagacggcgccaatgttctgtatagtttctagaacacaaatgtacagcacgaaagcgctgtatgattactgtttgatcactctaactccgcaactacgaagatatcgatggtgaacgatatcccacagtagatgatcactgagatatacgaaattggggtggggtgtgtgctcagtgtaattgaaagagagagagagctagagtgtgtgtaccttttaagcgcctatacccgtgtatttataggcacattaccttgcggttagatactccaactgcaaacgcaatactccctatattcttggcctcaacctgcacgttcataactgctccagtagaccaagtcgtagtccacattcattgaatctgttaacacacgtggtattaaaggaaattgggcttcgatattaggcccaactattattccataacactctcaatagaaacaaattttcaatctagataaacattcagtgtgtaacttaaggctattagtaactacaatgattattatattgaccatttctcaaagcatctgggtgacataattaggaagtaattgcaatcaatttggtgattatcatgattgagactgcgagagcaaggaggggtgggagcaatgcatgcatatgaatgtaacttttaaggttatgttgttaatgtcctttttatttatataaaaaagatttggttagttgaatagaaagttcacaagagtcatgacacaatacttgaaaattaataacaatttttttatatattaataacaagatttaaacttgcatatatttataggatgagtcatgattttttatctaatgagcatatatcttacaagctaaaaaatatatcaaattatgttattggtaataaataattattaatgactaatttatgtcgaaaaaaaatttgtttgatcatttttagtaaggttgtttttttctaattagattttttttatttacaaatctcgaacttgagatcttaagaagactgagtcaaaaattatttggattaatgactttttaataaagattggattataatgcataagcacaaaacgtggactgcttattattgactgtaaacatgcatttaactactaataaatcataaatggtagtgaaatggagtggttaataacagagactatatgtgagctataatttgttagaagcttagctgattaccttcattctgttactggaattgtattcaccttccactttcatgttgtaagtacagttgtacacaaaattaatcaccgaatccaatacaatgacatcccatttctaatcctctgttaagagttatatgatatgtggtcacttttttcactatattttcttggataatacttttttcttttttacttaattggagcaatatataaatgatgaataactaatctttatttgattcatgttacctcctcaaatcttcttaatttctttttcttaaagtgtatgtaacagcaactgaactcacatggggagaagatcctgactcagaactcattgaccccacaccagatttctgtaataattctgtccctcaaccccttcactgcttcacagctcacagctaagagctaatgagctgttgcctgttggtgtgcctatacgtctgttactaaagtttcttgttataagtcaagcaaagtacaaagataaaaaattaatttccaaagcattcatccgcgtaatgataaaaaattaatttcaagtagaccatatcccccacttggaattcaacctcccttctgttcttattggcttgttgattcatttttttgaacttacactaaattctcgaggttttggagaaatgctataagcactgaacagaatagcagaaaaattgcccgtcccaattaaatttggacgcctgtcaactgactattaataaatttcaactttttaaaatgtttctaggtttaaagagaaaataattaagtaattatatgtagagaaaaattagaaaagtgttttataaaaagacaaataaaattttaaaaagagtcttataattaagagaaaaaagtattttaactaaattaaatacattacgatcatgttttgttttttttttttttaggtaaaaaaagaagatgctttaagcattgaatcaaaagtgtaacatttatttagtattggaattgattgatattcttaggtggaggaacttgtttatggagggtggtggcagataaggatctaaaaaccaactgtaatcgcaatagcatatttatttgataatggatgattctttcagaccgagattggtacaaaaatgcaaagtcaggcatcaactaatctcgttgcctacttttgggtttatgaggaaagacagcgaaccaagggatggaaacgcggcttgccattgatgagtacaaagggtaaatttcagaaaataatatttctttaatatatttaaattaactaatatttgattgacaggtttagcaatttcattggacaggccatatttatttgtatcaaagtttgatttgggaccaacacgccaatcatttattattataatccaataattattattataatccaactaagagtttctacgtcttcaccgttttttatttttgagtgatatgattgatttgtggagttggatccatgattaaagaagaataggtattagagtaatttttgtgagtattatttttactctttacatttttacaaactgaaaataaattaacaattaaaacttataaagtcatgtaagtttttttaaaaaaattacaacttttttaaatggtaattaaattttaaaaagctattaattttgttatcgttcattcataattgtatgactttttatttttttattctataatttaatatttatctttgatatgcacacagaaaggaaaatatagatttttcggttaagttgtttcgtgcaataattaacgttattttgatgggtccgcgactcggcataataatgtatgttttgtttggtattccgcgttcactttactcttgtcaccttcatattttaacgtgaatctggagacccaattaacaagcaatccacaatcatactaagttttcttctatatatataggaatttttattggaaaaaaaaagcataattctacttgaaatatgagatataagattgattgcatgattaaaaattatgaatttgatctctcctgttaataaaaattaagaaattaataattaatatttattgatataaaaaaattaccttttaagaactttaattaattggaaactcttataagattcatccactaaacaacttagaaagagagaagaaaaagagatatatccgcaatccacctaatataaagactctatgtccgcgtaacattgttgtctatcattcaaagtcaacccaccacccatccactcaaagttttatatagaatgacttttttaagtcatcattaaactttaagatattcttaattagatcattgattcgtagttatatgaatttttgtttttacttattattaattgtgcatgttttctataattttatatttacctatattattttattttcaggtaaacatacgttatttataaccattttttcaaacaatatactttggattgagtacagaggattctgactcgaaaaattaatatcccttattcaaaggatgttctaaaaaacactaatttcatcactggaaataactttatcaccaaaataatttcttaaacattcaatttcttttatcattcaaaaataaagtcaattttaatattttgatacaatatttataatgcaaatatatgtaatgataattaaatattactttaagaatacatgcatctactaataaaaaaattaaattcatctaactaagagtaaaacaacttattatatatttagatatgattaattttaggggcaaggatactttttaggataaaaaaatttaacaacaaatttgttgaagttcatgaataaaacttatcagcttattttttagttaacattcactagtatttttttttattgctaacaattaactttttggggggatgtaccattataaatagtcaattattttaaatatagtgccaattataaaaattgacaatatactttattaatttgtaatgattcattgcaaaaaaaaagtattttttgtaacacagtttattttatagaaattattgtgaaggaatctttctttatggttgtttgtgtggtgtagaacgtataccacgggttaggcacagtcaaaggttttcacttctaagaaagagagacgaaacagagagagattttccattaagttatatgtccatgtaaatgtaataatatatatgtttggtactgagtgtaattaacacttatcacgttcatatttattcaagtttgattttggagaattcacattcatactaagatttcttatcatggctttgggatcacgttcctcttcctgcaattacgatgtgttcctcagcttcagagggaaagacacacgtcatggttttactggccatctctacaaagctcttgatagcaagggaatccacactttcattgatgatagggagcttcaaggaggagaggaaataaaaccagcacttacgaaggcaattcaagagtctagagttgccatcactgtgctctctcaacactatgcttcttcctcgttttgtttagatgaacttgcaaccatccttcactgtgaccagaggaaacagtcgttggttatacctgtcttttataaggtggatccttctgatgtgagacaccagaaaggtagttatggagaagcattggcaaagcttgagaggaggttcccggagaagttgcaagaatggaagatggctctggagaaagtagctgacttgtctggctatcatttcaaagacgggtatacaaccatactaatctttttactttatagtttttgttggattaacttttacttgtctgattatttgacattaaatctaaagggaaaataaatgcttgttgaccttgacaatagacgtatcaagacttggatacatgcaaggtgatatgcatccagcatatggtcctttccaagcttctaaaagcctagaatcattgataaacaactcagaattgcacataattatgataattgttgatgattccattcctttcaagtgtcgtgctaatttgaaacttgttttgtttgaaacagagatgaatatgaatacaagtttattgagaagattgttgagcaggtctctggggtgattgatctttgtcgtcctttacctgttgccgattgcccagttggactaaagtcacgagtttcagatgtaaggaaacttttggatgctggatctgatgatggtgcccacatggtagggattcatggaatgggcgggataggaaaatcaacacttgctcgagctgtctataatgaattgataattgctgagaagtttgatggtttgtgttttcttgcaaatgtgagggaaaactcaaacaaacacgggttagaacacctccaaagaaaccttctttcagaaataattggagagaagaacatcaacttaacaagtaagcaacaagggatttcaatcatacagtctaggctcaggggaaagaaggttctcttgattctagatgatgttgacaaacacgagcaattacaagcaattgctggaagacctgattggtttggtctcggcagcaaaatcatcatcacaactcgggacaaacaattgctagcatctcatgaagttaataaaacatatgaggtggaggaattgaatgggaacaatgctcttcagttgcttacatggaaagctcttaaaaaggaaaaagctgatccaacttatgaaaagctcttgcatcttgcagtaacttatgcttctggccatccattggttttggaagtaataggttgtgacttgtttggaagaagtatagtagactgggaatctgtcatcaaacaacataaaagaattcccaagaacgaaattctagagagacttaaagtaagctttgatggtttggaggaagaacagaaaagtgtttttcttgacattgcttgttgtttcaaaggacgtgatttgcaagaggttgaacatatacttggttgtctttatggtgactgcatgaaacataatattggggtgttggttgaaaaatctctaataaaggggagttgggatggtgtagttaacatgcatgacttgattcaggacatgggcaggggaattgaccaacaagaatcgtcaaaagagccagggaagcgaaggagattatggttaacagaagatataattgaagttttagaagacaactcggtaagtgagagtatggtttcttatcttgatcttttttatttttgtctatcgtatctttatatcatagtcaagtttttcatgacaatttgtaaatttctttaaacaggtgaattgatgtcttacatataacttgtattgtggttgatttgtaccttttttcattaacagggatctagaaaaattgaaatcatatgtctggatttctccttatccgagaaagaaacaacaatagaatgggatggaaacgccttcaaaacgatgaaaaaccttaaaatactcattattagaaatggtaaattttccgaaggtcccaattattttccagaaagtttaagagtactggagtggcaccggtatccttctaattgtttaccatctaattttaatcctaaggaacttgtcatatgcaagttacctgacagttgcattacgtcatttgggctccatgactcacggaaggcaagtttaaggagtatattttcttcatcttgttaattaataaattcactttaaatttattcatttggttctttttttttcttttttctttttttttctttttttttttttttttttttgcagaagttcgggaatctaaaggttttgaattttgacgcgtgtgaatttttaacagagatatctgacgtatctggtctcccaaatttggaggaactttcatttaatcggtgtgggagtttaattacagttcacccctcaattggtttactaaataaacttaaaatattgagtgctgatggttgcagcaagcttaccacatttccacctctgaacttgacctctcttgcaagtcttgaactttcaaattgtttcagtcttgagaactttccagaaatattaggagagatggaaaacttatggaaactttctttgaaaaaccttaccctaaaagaattgccagtttcatttcaaaatcttggactcggctggttaaacctggataattgcgaaattggttgctttccaagtagcattttcgtgatgcctaaactgtttgttgtgaaagctacaaattgcaaggggttgcaatgggttaaatcagaaaagggtgaagaaaaagtgggctcaagagtatgttcaaatgtatttgaattcagtgtcgatggttgcaacctgtatgatgatttcttttcaacaggtttcatgcaggttggtcatataaaaactttatgcctaaggaacaataatttcacattccttcctgaatgcatcaaagaatttcaatttttaagaagacttgatgtgagtggttgcttgaatcttcaggaaattaggggggttccaccaaactcaaaagatttcaatgcaacagaatgtatatccttgtcttcctcgagttcaacaagcatgttgttaaatcaggtattgtcttgtttttaacgtatatatatgatttgataatatattgcacacttgatattaataaacttatgatatctttatgaaatatgaccaacagaaattgcatgaggctggacaaactgtgtttcggtttccaggagcaactattccagagtggttcaaacagaaaagtaggggaccttcaagttctttctggtttcgtaatgaattccctgacaatgttctttgtcttcttatagcacgtctggaatgcaaaacaaaatttggacttgaacccaacgtgttcatcaatggcaaacttcatgaaaaattctctcatcacactagcgtaaaaaaggtgaaattgtattatacatatctatttgacctcaaatcagcgtgtctgccatttgaagtggctttagaaaaggaatggacccatgtggaaattacatacgcaggtgtgatggagacctcactggttaaagcaaccggaatccatgtattgaggcaggatgatattcgatatgataatccttatggcaagacaaaattagaccatgatctcaacagctctgaatcacaaccactcattaaaaagcataggtatgtagacaagcaagtttcataattatgttatatatgaaaattatacttttaaattgtaataaagtaaaaaataccaatattataaatataaagtcaacatatgagatggtgtgactgaagagaagatataataggttgttttgcaggatatcgaggtgggttggccctgaaagaattagaaagcttctgtggaaagctgcagatggagctttgattcctaatgcccttactattaagaacttcccttgtcggcgatgtggcgtgttggaggagacatgtctgcatactcttcgtgattgttttgctgtgatagcgttttggagaagtgtgttacctaagcaattagcaccaaagttttttaaaggtgatgtaacagtgtggctggaaacaaatttatctttttcagaggcagctttttttggccgactttttttgggattgcagtggaagtggtcttggaattgcgcaataaccatgcgttctatcataaatacaatgtttacggttcccgtaatatgatgtatgttgtctttaagcgttataaagattttatgagagcccatgcttctcacaatttgatgacgaggaatctcttgaagtggaggagtcccgaacatgatgatgaggaatggttgttgaggttaagagtgagtggtgcatttgatccctcttctggtactgctgcatgcggaggtatattcacagacaattattatagatacgtgcttgggtattcggttaaggttggggaatgttgctcaaaagatgaggctgaaatatggggtatttatcatggtatgaagattgcaaggcagtatgatatttggggtgtttatcgtgataaactaaggcagcgtaggattccaatcagacctaagattgcaaggcagcatgattttggtgaaatttgggtggaatcggggtcgcagaaagctattgagtttgtgttagatggatgccctacatctgcatctacatctagatctagatcgctgcagcattgcttccctctctgtcctgaattgcaagctctgacctctgctactaatcacttttacttcttttgcagagcgagcaaggctgttgaatcgtttgccaaattcgggagtatattttcttcatcttgttaattaataaattcactttaaatttattcatttaattctttttttttcttttttcttttcttttcttttttttttttttttgcagaagttcgggaatctaaaggttttgaattttgacgcgtgtgaatttttaacagagatacctgacgtatctggtctcccaaatttggaggaactttcatttaatagttgtgggagtttaattacagttcaccactcaattggttttctaaataaacttgaaatcttgagtgctacgtgttgcagcaagcttaccacatttccacctctcaacttgacctctcttcgaagacttaaactttcagattgtgtcagtcttgagaattttccagaaatattaggagagatgaaaaacttatggatgcttaatttggataacattcacataaaagaattgccagtttcatttcaaaatcttgttggactgcaatttttattactgcataattgtgaaattgataggtttccaagtagcaatatcgtgatgcctcgactgtcttgtgtgtgggctgcatattgcaaggggtggccatgggttaaatcagaagagggtgaagaaaaagtgggttcaatagtatgttcaaatgtatgtgacttcagcttcagtggttgcaacctgtatgatgattttttttcaacaggtttcatgcagcttgatcatgtggaaactttatccctagtgaacaataatttcacattccttcctgaatgcttcaaagaatttcaatttttaagaagtcttgatgtgagtggttgcttgcatcttcaggaaattaggggggttccaccaaacttaaaagatttcagggcactagaatgtatatccttgtcttcctcaagttcaagcaagttgttaaatcaggtattgtcttgtttttaacgtatatgatttgataatatattccacacttgatgttaataaacttatgacatctttatgaaatatgactaacaggaattgcatgagtctggacaaactaagtattgttttccaggaacaactattccagagtggttcaatcaccaaagtaggggaccttcaagttctttctggtttcgtaatgaattccctgacaatgttctttgtcttcttaaagcacgtgtgggatatgaacttgattatctcatgcccacggtgttcatcaatggcaaacatcataaaattcactcttgtaacactctagtaagaaaggggaaattggattatacatatctatttgacctaaaatcagcatgtatgcatgatgatgtatttgaagtggctttagaaaaggaatggaaccatgtggaaattacatacgcaggtctcatagagccctcactggttaaagcaaccggaatccatgtattcagacaggatgatattctatatgatgattcttatggcaagagaaaattagaccatgatctcaacaattctgaatcacaaccacacattaaaaagcataggtatgtggataagcaagtttcataatcatcttatatatgaaaattatactgttaaattgtaatccatgtattcagacaggatgatattcgatatgatgatccttatggcaagagaaaaatagaccatgatctcaacagttctgaatcacaaccacccattaaaaagcataggtatgtagacaagcaagtttcataattatgttatatatgaaaattatacttttaaattgtaataaagtaaaaaataccaatattataaatataaagtcaacatatgagatggttggtagacgtggtgtgactgaagagaagatatagtaggttgttttgcaggatatggaggtgggttggccctgaaagaattagaaatcttctgtggaatgctgctgatggagctttaattactaatgcccttacttctaagaacttctcttgtcggcgatgtggcgtgttggaggagacatgtctgcatgctcttcgagattgttttgctgtgatagcgttttggagaagtgtgttacctaagcaattagcaccaaagttttttaaaggtgatgtaacagtgtggctggaaacaaatttatctttttcagaggcagcttttttttggccgactttttttgggattgcagtggaagtggtcttggaattgcgcaataaccgtgcgttctatcataaatacaatgtttacggttcccgtaatatgatgtatgttgtctttaagcgttataaagattttatgagagcccattcttctcacaatttgatgacgaggaatctcttgaagtggaggcggctcaaacttggtgaggattggttgttgaggctaagtgtgagtggtgcctttgatccctcttcaggtactgctgcatgcggaggtatattcatagacaggggttatagattcgtgcttgggtattgggttaaggttggggaatgttgctcaaaagatgaggctgaaatatggggtatttatcatggtatgaagattgcaaggcagtatgatatttggggtgtttatcgtgataaactaaggcagcgtaggattccaatcagacctaagattgcaaggcagcatgattttggtgaaatttgggtggaatcggggtcgcagaaagctattgagtttgtgttagatggatgccctacatctacatatagatggctgcagcattgtttccctctctgtcctgagttgcaagctctgacctctgctactaatcacttttactacatttgcagagagaacgggtatgctgaatcgtttgccaaattcggtttatccatgaaagagcaggctgcctctattttttctgagtggccctcatttttatgaaatctcctgtactgtatcaaaattttatatttttgtattttcaatttttatgtttgtaccaattcacttattttctgagaggccctcattctcttattttaatatttatatctcttatatctatgtgttaaaattcattatttttttttgacttttcttatatgtttattattattattattattattattttatatattgatttgaatttcttttatattttctcaaataaagtgtgtaactttttgtttcttatctcatattgttttataacatttttatcatattttacattgtaaaattatttattttttcgtttgggtctctaaaagatcattgatgttgcatcgaactgagtatccttatgtttgccaattgcaattgggcacgaaaacgttcaattgaaaacaacatttggctacatctccatcaacgttcactggatcagttagaggggtaagattttttatttttaatttcaacaacttcttccaacattacccactcaacaaccagcattaaaccataaatgcggtcatttttatttctaatattaattaaaatgtatttttatatgtacatattttaatatatttttttttgaaaacttgatatatttttattttataatgtaacaacaatttttaacaagatgtaataatatattatcaatttaagtatccatttttggtataaaaaaagagaaagataaaactaaattttctaataacttcccgtatgtatatttgtgaatataataagagatttataaaagggaagatttaggaagctttgattactaaataaataacttatctatgaatatttttctgtggtatgttttaattaaaaagtaatgaaataaatcatagtattatatttaaaattctattcaaacacttaatgtttaatttagtaattatataattaacttacttttcatccaaattatccaaacaagtttaattttgataaaagtacttttatttttataataaagtatctaaatatacaacaaattatatttaatttacttttatctaaactaaaaagttaaattacattttaaatttacaaactgtaattcaaacacatatcagttcaggaatctaagctccaaccacaatggacacattaccaaataagttggttgtaacccatgttttttttaattgttcatgaacgttttgaagtaaacatgaataatcaaattggtcgacaatcaaattataaaatataggatttgatatttttatataaattttaattttaatttttttattaatatatatatatatatatatagaatgataatatatattttaggttagttataattttgtattttaattaattttaaaatcattctgcttttcaattacagatcaattatttaattatattttttagttataattattatattttttcatattatgcattctacagttaatgttatattatatattaaaatattcgcaatgatgtttaaaataaattaaattaataatcttaaatagatattatatttttattgtgtcaattaacgtaataattaaaatatcttaaagtgtaatgttaaaataatataataaataatatggtattactcatactcgataagcctgtcaaaaatggtagaaacaaatataaatagtgtaatgtaaaataaatagtgcaagaaaaaaaatactttacttaaaaaaaggaaataaagagatttattaaatattttatgagtaagaaggaaataaatataaaaagataaaaattgtcattttgaaaattgtcatgaggtagcatctcaaattgttttcaaattattaaaaaaacttgtttgtcaaacactgtttataaagttaaacaaattttgtagttgttaaaacaattagaaactaactagaaatatttgtcaaacataaactaaaataatattttaggatcaaattatattgaccagtgtttcaaaaattataagtaacacgttagataagaagtagatctcataaaattttgtaatttttaataaatttaaattaattcatctccatttatgtgattgttgatgaaatgaatactctctgcttgtgaatgtttgttgggactttgttattattttatgatgttacattataaaattataactgatttttaacattacttttttgactctctttaataattggttttaagtgaattttaataataaaaaacctaaaataaaaaaaaaacagaagtaaaaaaatgtccaattaaattgtatttttgaattgaggttaaataaccttttctccttttgttgttttaaagaacttttagtacttataaaatgtgatatttttattttagttccttaaagatatattttattttaattcctgcaaatttaaaaatttaactttaatctctactcattgggaaatgtttatactcctagaacttggaaagaacttctaaatattccatatctaaagatagaatgaaattatttagttttagttatgcatctttattcttaaaacaaattatttgatgtagttgttaagagattagaagtgttattaggtaatttagactctttcacataagggatcatgattaggatatgttagcggatgaaggtaataattgtaataacgttaaatggtgaaaaatctctaccattgtatcaagagtagtttcggtaggtcaaacacttaacacgtccatgaaatcatgcatcaacaggcaattaacaccccaagcaaacatgttttgtctctttaatattctgcttaattatctttatttatgttgaattttacatttttcgcatcattactagataaatactgaatttagtcaattatctgcttaaaattagaaatatacaaactccaagtcgattagtcaaagtctttgtggacttgacactcaaacttactctagtaattactacttggatgctggatctgatgatggtgtcaacatggtagggattcatggaatgggcggggtaggaaaatcaacacttgctcgagctgtctataatgaattgataattgctgagaagtttgatggtttgtgttttcttgcaaaggtgagggaaaactcaaacaaacacgggttagaacacctccaaagaattcttctttcagaaataatcggagagaagaacatcaacttaacaagtaagcaacaaggaatttcaatcatacagtctaggctcaggggaaagaaggttctcttgattctagatgatgttgacacacacgagcaattacaagcaattgctggaagacctgactggtttggtcgcggcagcaaaatcatcatcacaactcgggacaaacaattgctagcatctcatgcagttaatgaaacatatgaggtgaaggaattgaatgagaaagatgctcttcagttgcttacatggaaagtttttaaaaaggaaaaagctgatccaacttatgtggaggccttgcatcgtgcagtaacttatgcttctggccttccattggctttggaagtaataggttcccacttgtttggaaaaagtgtagaagaatgggaatcttgcatcaaacaatatagctgaatgcatcaaagaattgcaatttttgttgctgtgttttatttgtttgtgcatgttttggcgattgagggatagagacgtgtgattatgtgcttatttatttatttgtaatggttgtgttcacattagtgctcagacggcctctactttaggttgtgccttttctaattgtttataacattttcttgtacgaagatctgaatttcaattaagattgccttaaaaaatgaatactcaggttttggtttaaatgcatgcaaggacaccctggacgtgtgaatttgctggttcttggtgaagttgaaaacacgtgtgatcagcaacaatgacattggctttgggacggctctagtagggaaaaagctcaagcgattggcagagctagatgatcaatttatatcaagagtgatgatatatagatattcataaatcataaatacctatttgatattatttttttacatgattgataattttttaattattaaattaaatgaatcctcgttgatgaggtatgtaatggacatgagatcatcctttggagagtgctgagtgcactgaatgcagcaagatagttgaaatcaatattttccgcgggaggtttagtcaatataaaaatgtaaaatatgcgaccatttgaaggacacttaattttctcattagtaaaaaaaaggaaatgctcataaaaaaatattaaaaagaagttaagaacaaaattaaatgtgtttaacttcttgaatagtgttagagggcaaggccatgcagaaaattcttcatcatgagaagtttagtgtcacgtgagataattcaggaatctggaagtgtctctagaaggagtgatcgaaattgaattgtgatggtgcatattctcgggcagccgatgttgcttcatgcggtgttgttctttgcactagtcgagtaggcaattttattcaaggaggcttggacattgctctatctatcctgaaagtggagcttttggccaactatttttgggattgcagtggaactgttgtgggaattcggcaatgaccctgagtcctatcttgttagccgttatgtttacaattcccgtgatatcaagtatattgtctataggcgttataaagattttatgagagcccatgcttctcagaatttgatgacgaggaatctcatgaagtggaggtggcccgaaattgatgaggattggttgttgaggctaaatgtgagtggtgtctttgatccctattctgtttctgctgcttgcggaggtatattcacagactacaaacgtacattcgtgcttgggtattgggttaaggttggggaatgttcatcaaaagatgaggctgaaatatggggtatttatcatggtatgaagattgcaaggcagtatgatatttggggtgtttatcgtgataaactaaggcagcgtaggattccaatcagacctaagattgcaaggcagcatgattttggtgaaatttgggtggaatcggggtagcagaaagctattgagtttgtgttagatggttgccctacaactacatctgcatctacatcgctgcagcattgcttccctctctgtcctgaattgcaagctctaacctctgctacaaatcacttatacttcatgtcgtctaatatttgggttggcgactatccaatctttagacagctggctgctaaatcgtttgccgaattcggtttatccattgaagagcaggctgcgtctattttttctgcttgtccctccttttgcaaaccttatgttcgggaaggattgtatgagttacattactttaaccattggctacttctccatcaaagtttgttggatccgttagaggggtaagtgttttttttcttaaaaaaaattcaacaacttcttccggcaattaaccctcaacatccaacataaaacccatgattgggttcatttctatttctaatattaatacattggttgtaacccatatttttttttattgttcaagaacgttttgaagtaaacatgaacagtcaaattagtcaacaatcaaattataaattataaaatataggattgatattttcatataaattttaattttattttattaatatatatatatatattgatagaatgataatatatattttaggttagttataattttattttctaattaattttaaaatcatttcacttttcaattacagatcaattatttaattatattttttagttataattattatactttttcatattatggattctactgttaattttatattatatgttaaaatatgcttattattgactgtggtaaacatatatgcgtttaattacaaataaatcataaatggtagtgaaatggagtgattaataacagggactccatgtgagctataatttgttagaagcttagctggttatcttcattctgttactgttgtattcaccttccactttcatgttcctagcacactagtacacaaaattaatcatccaatccaatacaatgacattccatttctacatcctctgttagagttctatgatctgtggtcacttatttccactttattttctttgtgaatatctttttttttttacttaattggagcaatgtgtaaatgatgaaagtaattttaatttgattcattttacctcctcaattcttcttattttcttttttttaaaagtgtttgttcaaaaccaaactagccctaaattgtctggcaaatggtaaagaattactattttttagtttgttcttactcattctatgatacaactttcttaatttttcttctttaattagttacattgcagcccttttgggtagtgaggccattgttgttactgatctgccagataggccgaggctaatgagaaagaacattgagatcaatatgaaacttacatgttctctgcagggttctgtaacagtaactgaactcacatgggcagaagatactgactcagaactcataccagatttcggtaataattatgttcctcaaccccttctcagctgacagctaagagctaatgacttgttggtgtgcggatacgtctattacttacgattcgtttgctagaaaagaaaatggaaagaaagaaaatagagagaaaaaaaaaatgaaacattttttatacttttttgagaaaaaataaaggcaaagttaatttttggataaaaaatttaacttttttctcctttttttcaatttaaatttaatttttttcttctccttctagccaaccaaacatagggtaaagtttttgttaataaggtaagcaaattacaagaaaaaaaatgaatttccaaaacattcatccgcgttatgtacgatatgtccgcgtacactttagtctattaatttcgaggaaatgctataaccaccaaaaaagaatagcaggaaaattgccagtaccaattaaatttggaccctgtctaactattgattaatttcaactttttaaaatgtttctcagtttagagagagaataattaagtaattatatgtagaaaaaaaataactaatatgtttagaaattagaaaagaattttataaaaaagataaataaattttaaaaaaagtcttataaataaagataaagaagtatattgactataaattaaagacattacgatcatgtttttttttcagggacaaaaagaagatacttttagcattgcgatcaaaagtataacatttatttagtattggaattgatttatattcataggtggaggaacttgtttatggagggtggtgggcgataaagatctaaaacccaagtgtaatagcatatttatttgataaatggatgataattttggaccctgattggtacaaaaatgcaaagtcaagcatcattatgagggaagacagctaaggaagggacacgcggcttgccattcttgagtacttaggctaaatttgagaaaataaaatttctttaatatattaaaataactaatatttgatttttaacaatttaattggacagaccatatttatttgtatcaaaggttttcacttttgaaaaagagagacgaaacagagatgaaacagagagacattttccataaagttaatacatatgtttggtactgagtgttattaacacttatctctttcatatttattcaagtttgattttggagaatccacattcatactaagatttcttatcatggctttgagatcaccttcctcttccttcaattacgatgtgttcctcagcttcagaggggaagacacacgtcatggttttactggccatctctacaacgctcttgatagcaagggaatccacactttcattgatgatgaggagcttcaaagaggagagcaaataacaccagcacttacgaaggcaattcaagagtccagacttgccatcactgtgctctctgaagactatgcttcttcctcgttttgtttagatgaacttgcaaccatccttcactgtcaccagaggaaacggttgtcggttataccggtcttttataaggtggatccttctgatgtgagacaccagaaaggaagttatggagaagcattggcaaagcttgagaggaggttccaggatgacccggagaagttgcaaaaatggaagatggctctgcagcaagtagctgacttgtctggctatcatttcaaagacgggtatacaaccatactaatctttttactttaaagtttttgttggattaacttttacttgtctgattatttgacattaaatctaaagggaaaataaatgcttgttgaccttggcaatatacgtatcaagacatggatacatgcaaggcttttagttttaacttgttaaaacttgttttgtttgaaacagagatgaatatgaatacaagtttattgagaagattgttgagcaggtgtctggggtgattaatctttgttgtcctttaaatgttgcggattacccagttggactaaagtcacaagtgctacatgtaaagatgcttttgaatgctggatctgatgatggtgtccacatgatagggattcatggaatgggtggggtaggaaaatcaacacttgctcgagctgtctataatgaattgatatttgctgaggagtttcatggtttgtgttttcttgcaaatgtgagggaaaactcaaacaaacacgggttagaacacctccaaaaagaccttctgtcagaaataatcggagagaacatcaacttaacaagtaaggaacaaggaatttcaatcataaagtctaggctcacgagaaagaaggttctcttgattctagatgatgttgacacacacgagcaattacaagcaattgctggaagacctgattggtttggtccaggcagcaaaatcatcatcacaactcggggcaaacacttgctaacatctcataaagttaataaaacatatgaggtgaaggaattgaatgcgaacgatgctcttcagttgcttacatggcatgcttttaaaaaggaaaaagctgatccaacttatgaggaggtcttgtgtcgtgcagtaacttatgcttctggccttccattggctttgaatataataggttcccacttgtttggaaaaagtatagaagaatgggaatcggccatcaaacaatataaaagaattcccaaccagaaaattctagaaaaacttaaagtaagttttgatgctttggaggaagaagagaaaagtgtttttcttgacattgcttgttgcttcaaaggacataaatcgaaagagcttgaacatatacttagttgtctttatgatgactgcatgaaacatcatattggggtgttggttgaaaaatctctaataaacgtttgggatggtgtagttaacatgcatgacttgattcaggacatgggcaggcgaattgaccaacaagaatcgtcaaaagagccagggaagcgaaggagattatggttaacaaaagatataattcaagttttagaagacaactcggtaagtgagagtatggtttcttattttgaactctttttttgttatcatatctttacttcatagtcaattttttcatgacaatttgtaaatttctttaaacacgtgacttgatttgttacatatatcttgtattgtggttgatttgtaccttttttcattaacagggatcttgtgaaattgaaatcatatgtgtggatttctcctccttatccgagaaagaagcaacagtcgaatggaatggaaacgccttcaaaaagatgaaaaaccttaaaatactcattattagatatggtcaattttccaaaggtcccaattattttccagaaagtttaagagtactggaatggcaccggtatccttctaattgtttaccgtctaattttcatccgaaggaacttgtcatatgcaagttacctcacagttgcattacgtcatttgggttccatggctcacggaaggcaagtttaaggagtatattttcttcatcttgttaattaataaatccactataaatttattcatttagttcttttttttttccttttttttgcagaagttcgggaatctaaaggttttgaaatttgacgagtctgaatttttaacagagatacctgacgtatctgatctcctaaatttggaggaactttcatttgatcggtgtgggaatttaattacagttcaccactcaattggttttctaaataaacttaaaatattgaatgcttatggttgcagcaagcttaccacatttccacctctcaacttgacctctcttgaaagtcttcaactttcagcatgttcgagtcttgagaaatttccagaaatattaggagagatgaaaaacttattgacgcttatgttgtttgaccttaacctaaaagaatggccagtttcatttcaaaatcttgttggactccaaattttatacctggctaattgtgaaattggttgctttccaagtagcattgtcgtgatgcctaaactgtctattgtgagggctagcaattgcaaggggtggcaatgggttaaatcagaaaagggtgaagaaaacgtgggctcaagagtatgttcaaatgtatatgaattcagtgtctatggttgcaacctgtatgatgatttcttttcaacaggtttcatgcagcttggtcatatggaaaatttatgcctaaggaacaataacttcacattccttcctgaatgcatcaaggaatttcaatttttaagaatccttaatgtgagtggttgctttcatcttcaggaaattaggggggttccaccaaacttaaaatatttcactgcaagagaatgtatatccttgtcttcctcgagttcaacaagcatgttgttaaatcaggtattgtcttgtttttaacgtatatatatgatttgataatatattgcacacttgatattagttaacttatgacatctttatgaaatatgactaacaggaattgcatgaggctggacaaactatgtttgggtttccaggagcaactattccagagtggttcaaacagaaaagtaggggaccttcaagttctttctggtttcgtaatgaattccctgacaatgttctttgtcttcttatagcacgtgtggaacgcacagatggatttgatattcccatgccccgggtgttcatcaatggcaaacttcatgaaaaatcctcttttaacactagcctaaaaaaggtgaaattctattatacatatctacttgacctaaaatcagcatttaggaatcctgataacaatctaagtgaagtggctttagaaagggaatggaaccatgtggaaattacatacgcaggtgtgatggagacctcactggttaaagcaaccggaatccatgtattgagacaggatgatattcgatatgatgatccttatggcaagacaaaattagaccatgatctcaacagttctgaatcacaaccactcattaaaaagcataggtatgtagacaagcaagtttcataattatgttatatatgaaaattatacttttaaattgtaataaagtaaaaaataccaatattataaatataaagtcaacatatgagatggtgtgactgaagagaagatatagtaggttgttttgcaggatatcgaggtgggttggccctgaaagaattagaaagcttctggggaaagctgcagatggagctttgattactaataccgaaaggagatataggcatctttctatggactcctcttgtccgcgatgtgggatgttggaggagacatgtctgcatgctcttcgtgattgtccagatgtggctgcgttttggagaagtgtgttacctgtgcaattacagccaatgttttttaaagttggtgtcacagtgtggctggaaacaaatttatctttttcagaggcagctgttttttggccaactttttttgggattgcagtggaactattgtgggaattgcacaatgaccttctgatttatggtggagactgttatgtcgagttccgttttatccagcgtactgtctttgagcgttatcaatgtattatgagtcgccatgcttctcacaatttgatgacgaggaatctcttgaagtggcggacgccccttactaaatgggattcgttgttgaggttacgtgtgagtggtgcatttgatccctcttctggtactgctgcatgcggaggtatattcagagactacgatgatagatacgtgcttgggtattcggttaaggttggggaatgttgctcaaaagatgaggctgaaatatggggtatttatcatggtatgaagattgcaaggcagtatgatatttgggctgtttatcgtgatcatctaaggcatgaatatgacattccaatccatcctaagattgcaaggctccagcatgattttggtaaaattggtgtggaatcggggtcgcagaaagctattgactttgtgttagatggatgccctacatctacatctgcatctacatctacatatacatccacatccacatctacatctacatctacatatacatcgctgcagcactgtttccctctctgtgctgagttggaagctctgacctctgctacatacttctcttggatgtgggaagagagcaaggctgctgaatggtttgccgaattcggtttatccatgaaagagcagtcgtctatttttgatgcttgtccccccttttacaaacgttttcctcctcggaaggaatggtaaaaagaaatagtgaaaaataattcattccaatcagtcctaagattgcaaggcagtatgattttggtaaaattggtgtgaaatcggggtcgcagaaagctattgagtttgtgttagagatggatgccctagatctacatctacatctgcatctacatctagatatagatcgctgcagcattgtttacctctgctactaatcccttatacttgtgttggggagagaacaaggctgctgaatcgttagccgaattcggtttatccatgaaagagcaggcgtctatttttgatgctgctccccccttttgcaaaccttttcttcctcggagtacatggaaaaactagtttcagtacccgttcattggatcagttagaggggtaggattttttaattttaacaacttcttccggcattaccctctcaacaaccaccattaaactcataaatgcgttcatttttatttctaatattaattcaaatgtatttttatatgtacatattttaataaatttttattattaacagtattgtctatcattcaaggtttattaacacattacttatccattcaaagtttagacttttatatagaatgactttttaagtggtcattaaactttaagaaattcttaattagatcattcattcatagttgtatgaatttttattttttcttttgaaaaatgaatttttatttgtatgtattattaattgtgcatgttttctataattttgtatttccctttgattaatttatttccgcataaacatacataggagttttttcaaacaatatgctttggattacataatgaggattttgtttcaaacaattaatatccctcattcaaaggatgttctaaaaagaaataatttcactgaaaataactttatcacaaaaataatttcttaaacagtcaatttcttttatcattcaaaaataaagtcaattttaatatttcgatacgaaatattacatatatatttaatgataattaaatattacttttacaatacatgtatctactattaaaaaaaattaaattcatctaacttaagagtaaaataacttattataaatttagatatgaataattttaggggtaacgatactttttaggataaaaaaaatgtacaacaaattttttgaaattcctgaataaaatttatctgcttactttttaattaatattcactagtattttttattgctaacaactagtattgggacccgtgcggacataggggtcacgcttcactacactctgctacatttttataaattaattttaatttttatatttaccataacaaaaaaatatttatatatgataatattgataaaataaattaacgtaattaactacgttattcttataactaataattaaattattattttacaataaatatagtaactaaaatgttattatgttggctatcgtaacaattgaattaaataaaagagtttaaaaatttcaaattttgattaaatttaaataataaaactataattttttttaatttatcaaaatttcaccattttattttacttttatttacccattatttgatatgacaaaaatttaaaaatgaatgatatatttaataaaaataaatattgtaaattgtttgacatgtaaatgtgtaaaatactgtaaaaaaaacattttcccatgacggtttactcatgatgacatagagaataattatctttcatacatgataattataatttcaaacattaaccaataaaattaaaacaaatttacaatatgatatagtgaataagtaattaaaagctgtcttataacaaaaatcatttttataatgaattattattttgatctctatcataaatatttttttatttatgatattattgataaagtaatttaaattaattaactttggttgtcttataacaaagaatcaaactattaatctttaataaatatattaactaatatcattatcttattatcgtaaaaaaagaattaaataaaaaatttaaaaattttaaatattcatttaatttaaatgataaaactaaaaaaattttgttttaaatgtcaaaatttaattttactattatttacacatttttcatatgttgaaatattaaaaacaaataataaatttaataaaaataaatacaattgattgtttgatatataaatgtgttaaaaaattttaataaaaaaatattctcataacggttaactcataatgacatatggaataattattttccataaatcataatcataatttctatccttaaaaaatgaatttaaaactaattcctattataatatagtgagtaagtaatttaaaactattttgtaacaaaatcacttttacaaattaattttagtttttatcgatataataattaatgataattttactaatgattgttgattatttgatatgtgactatgttaaatactttttgggaaaaaaattttccatgacagttgacccatgatgacatagagaataattaatgttggtaaatgataattgtaatttctaccataagaaaatgaaattaaaattaatttacattatgatatagttaataagtaatttaaagttttcttgtaacaaaaattatttttataaattaatttattttttatctctatcataactaaaaatatttttatttatgatattattcataaattaatttaaattaattaatttggttgtcttataacaaagaaacaaataattatatattattatgctggttataataacaattgaattaaataaaaagagtttaaaatttgaaattttgattaaatttatataataaaactataaatacttttattttttaaaatgtgactatttcattttattcttatttatttattttttatatcataaaaatttaaaaataaataatacattcaataaaaataaatattgttgatcgttttatatgtaattgtgttaaatacttctataaaaaatcttttccctacaacggttaaatcatgatgacccaaagaataattatttctagtcaatgataattatagttcctatgataaaaaaaatgaattaaaattaatttacattatgattatgatatagtgattaagtaatttaaaatttttttgtaacaaaaataatttatacaaattccttttaatttttatttctgtcataactaatcatatttttatttatgataatattgataaagtaatttaaattaattaactttagttatcctataacaaaaaataaaactatttttataataaatatattaactaaaggttattatgctaattatcataagaattgaattaagtaaaaattcaaaatattgattaaatttaaataatgaagctataatttttttaaatgtcactactttagtttatcatctatttaattgaaatttttttatcataggcaagctcaattttattaaactcaaatatgataatacaatgagtgtcaacgtgaagaataaaaaaatgtaaatatgttttttatttcttaaatatgatgtatgatctttttagtatctcaaattttaaattttttttatttcttaaaattgataattatttttttagtatttcatcacatatgacattaatataatatttttttgtagtccttatataatttctagggactaaaaataataattttaaagtaacaatattttgcaaagcttgttccactgtcacattatttggttaaaaaaaaaaatatgattcacagataccaacttacccgtgaatgaatgaagttatgacatcataaatgagaaacataatgaagaatttatataagattggtatttactatatagctagccccaatgatcataaaaacatgattggaatagtattataaataataaataaagtatgaatctctataatattaaatcaagtttatttggcatgattggaatttatccgatcactggccttgatagaggttcaaaacaaaaaataaatacacaaaaaataacatgaaatgcagaagctacatcctttatcacgcagaagttacatatgacagattccaaaacaccctcgatttcaaaatttgagttggatccagttagcctaaatcagaatgtccacaataacaggtcaatcactgtaaaataatagtatttgtgatattattgatttggttcattaaaataattaactttaatgatgttataacaaagaatcaaactattatttaataataaaaatattaaatagatattattatgttgctccgctatgctccgcatttttttaaaataattttaattttatatatatgataaataaaataatagtatttgtgatattattgatttggttcattaaaacaattaacaattaactttgatggtgttataacaaaaaatcaaactattatttaataataaaaatattaaatagatgttattacgctgctccgctactctccgcattttttaaaaatgattttaattttatatatatgataaataaaataatagtatttgtgatattattgatttagttaattaaaataattacctttgatggtgttataataaagaatcaaactattatttaataataaatatattaaatagatatgttgctccggtacactccgcattttttaaaatgattttaatttcatatatatgataaataaaataatagtatttgagatattattaattgcttcattaaaatgattaactttgatgatattataacaaagaatcaaattatctatactataataaatatattaaatagatgttattatgttgcttcactgctctccgcatcttttggtcattaaaacttttaagcttttaagtcagacataaaatattaattacttttggtcattaaaactttattttagtcctataagtttaattttttatttgctctcttataaaaaaatcatttgttattagtccctttgaaaaaatttaccaaagagtaaatacaaaattcgagtatttattagaaatcgaaaacatattttagccaattaagaaaaataaaacaatttcaagattggccagaaaagggtgaagctgtttcttggtacaaaatttgtagctttcgtttgccaagtcaaaacctgactcaacagaacaaaatgatggtgctcaatagcttagaatatctcaatagctttgcatctctatcatatgataggagctcaattaaataaagttatctgtatgtcctaataaactgattcatgattgatggaatgttaataggaaaaagaaatcgaagcctctgataagaaatcgaagtttctaattggtctatacagttattacagttaaatgatttggcgtaaccaagatacattgtggaagtacaaggttgtaggatatgatgatcctttgcatttggacaattcacaattgctatcaactcagtttttgtttcggaactttttagaggatcatttatattaggaatcagtaatactttgtcatgtgatataatgtcacaatatcaataatataattaaatgttccttgaaaatccttggcagtttgtttagttcttgcctagaagaaatcggagatggaaatggttttagtagacacgctttttagttccaaaatgcatcatcactttgctaagatcagctgcttttaagattagaaaaaaaaaaaaaaaactgagaagattgaggttttctcatgaggaattctgtttatcttgaaggaccaattaatatagagtataaatttattttcatgacttgtagaacatacttggtttggttacttaagatttgttgtggtgtggagcattgattcttttctgtccatgattttacaatataaactctgatttaccctgttatgactgacaacattaacatagagcctcatgaaaataactcaaattttattataagccatacatatttggtttcaaagtagactatataggctgagtttagagaacatcaaaatataacgtaatgcataggtgccctataatatcacttccatgcttcaagcatagacctcagggtttgccacaagataggcatccactaccttgaggagagccaaaccttcctcccttgcagccttgaaatcctcctctttgacatcaacccctgctttgggatgatacttgctgacattcttcatcttgcaacctccctcttcggtggcctcgaacttaacctcatgtgcaattgaatccactttttccagtgcaccatccccctcgatcactgcatagctgtaatttttttttgtagttactttggatttgttcagcattggcctcttcaggttagtttttgtttttgtgtatatttttttacatattggtaatttatattattaatttttattatatttttttatttatgtagtttttggttgttaaatattatttatattggcgatttaaaatattaggtttgagaatatttaagattagtttataattacttaatcagaggatacatgaaatataagagttttttttgttaaaatgcttcatttaaaatattttaataaatttaatttataggaaccttattcaaattaagtgtataatatagttggtaaatataatttgtaagatacaaatttattaaaattaattatatgttatagttgataaatatatattacttatgtagttgttttgtgttaaatagtatttatttggaacatttaaaacatgaggctaatttttttcattttttatttatattttgtatgaattggtaatttatatttgatttaaaatatatttttgatttatgtagtttttgatttttcatttgattttaaaattttatcataaatataatttgatggtttatattttaattttgtaataaattgttaatttattaaaaatacatgtttcgaaatttttgttgtgtgtatatttttaatttatacaggtacttatttacgagcaaatttgttacctgtcagatccacagatttcgctattgggtaaagctgattatgttgaccagtaattggctgccaagtcagctaatggaatccgctgcggtgacttgcgaactcttctccgtggcagtttgacaatttttccttacggcctggcactttcacatttagtttcttcaattgtggccttttgacgcttgtctcgcaagtgtttgatcttatcacctccattgaaggcattaccaataatgatctctttgttagtcatttcagtttgaaacctaccaaaagatatacggcattatggttagaatatatttagaaaacgaaatctttaggacataaaggtgaaaactaatgactggtgagctttacctcacatggtatgagaaattattatatgatctagaacaaccatgtgcctataatctcaattaatctgcacttgacatgtaaccaagtttttaaatttacgaaaaagagttaataaaactcgtagtgagaataagagaataacaagtctaataaaaaatgaccaaaacaataatacagtcaaacttgaaatttgaaaatggaacaacttgtagtgagtatttaaaaaaattcaactcaagtacttaatataaataaaacacgtgtaagagaattcataccacaagtagttcacgtagtccaaggggtgcagttacaatgtatgacacatctgggtgttcctttgctgcctctgcacttaaggaaggaatatcctgcataatagtggagtttaaatttttttgcctattttctatcttcataagtcaaagaatcattttgacaatttatagaaaagtaggagagaattctatgcagacctacctgactccaatgcctcccaggaaagagaaaaaagggactaacaataatgcaatgagcaccttgttaaacgcaagattgaaaagcatctcttattgatggttctgctaattcctgtaaatgtaaaatacaattatgaagcatcaagaatttgctccatagctacaattctctcatgaaatgaaaaggcaaagacatggctagatgcacaaagaaaattgtgttactaaaattgttatttctgccagccaaatctagattccaggtcagaccgggaaataaagggtaagcagctcaactatatttcctcatgaaggaaaatcatgtattattgtgcatgccaaacaacccaaggaaaatgcaaagaatcctaaaataatgccagacttgctcacatgctcgcaagttcttttttaagacccaggaagctttatccttaaattgaggcaagagatggcaaatagcctataggctgtagcagctcaagtatgaagtatctacctaccatcattcagatttcatttttcatcttcatatggtctttgggcacttgacatgatgaaaatctcaacagattacagaaattaccatatgagcaggctccacaatttcatacccagttgtatgcttaaacatctccacaaattcatctgacattcaaaaccagataacttttagacataaaatttaattatgccctagtaaccaattttaaaaaactcatctgtgaaagtaaactcatcagcttggggatgaggtttggagcatcaaggaccaaagccttgaacaaccttcctggctggacagtgctagtaaactcagtggtgaaagtaaaaacctacatgttaagtttggagtaaaatacaagatatggctagaaaattaagtatagagagcacttcgaattgcagtgatgtgagatatcagagatgtgtgtacttatgattgaagaggataaataagcaattaatgttacatttgacaatatttcaacaaacaaccactattgtgaaatggaccatccccttgcatgccttattaattccatatttccaatgaaagtctttgtttcctttacctatgtaaacatctaatcaaacaatgcaacctgtgagcctattactcctaatctatgcagtgataatacaaatcacacacattgtaggctaattaataatatactctggtctgtttttttaaactacttcgaaagctttgaagtctataatttaatttttctgtcagtactaaaaccttagggtctagctaatcacaacaaatgtgtatttatgagattctttttaatgaaaactttcaaatttttatttcgtaatctttggtctgaagctgaggagtgaagaatccaaacctgggagaagtcaagaagaagctgcagatgctgcgaagcaaggagaagcaacaaacgaacattgtttcattttataattttgctaaaacagaggtcagaaaaattcccaataaaactgataagagtgtaaatgttgaacataaagcagaaccatgaaacattaaaaaattgaaagttaaaatattaaaaacaaaaaagataaaaggaaatacaaagtatgagctatacaaagtatggattaaatatactattaggagtcaaattaacaaaaacattattattgtgtgtaacatcatttagcctgtaaattgaaatgggcaatgaactactgttcaagaattttttttggaagcaagtgttgatcacaaaactagtttggttataaaaaaaataatttatacttttgctcctatctttattataagatttaattaattatatcattagaattaattaaggaaataggttgatttttagttgagagcattaaatttattctaaatttatatttttttcaaaactatcccattgagaaaactaataaatattaataggtttcattgttacaccagtactctaaaattgaatttaattaaagattttttttaaagaaataactaatgcaaaagacaatttagattgattatataaaggatcgaattacacttttaaattggaataacaatttgtataacatttttgtatatttatctcttttacacattatttattacattttataatgatagatataaacacacacaaaatgttatacgaactgttatataaattacatactgcatatattacatctcataataaaacttgaacaaacttttctctgtttcttacattttcaatgtgtgtaccacttccacacatttattttccattgcaaaagaattggcctggcaaagtaaatcttttgctttgatactaaatttgagtcaatcattctccaaccttcaaaagcagttgataaacgtaaccaaattaacattaaagactcgttaagcaaaattaaaagagaaaactgtaaaatgcgtatttaaataaaatggagttttattttcgtacatggttaatctagagattttacattatatatcaactaataaaaaattgtcttaattataactttttaaagtaattaatacaaaaatccacaatgttactatatttgtacatgttcatgatagataaaaaatatttatactgtcgatgcattttaattaaatatatgaaaataatattacatgtttaataggagaaaagagtgggaagatttacattcatgaatacggtttaacagtatattattgcaactcatcaaatgtatcgctttcataataatttactcttatgttctgtttaactttgaaacttgagtatagatgaaaagaaattatccaaaaaagttgtcacagtcacacatgaaatacctctttataatgcatcaaacagtttcaaccaaagcccgtcgcaacctccctttactttctttggcacgttcaaaggacgtactgcatggtgtcaacatgtggaacaatatacaaacagagatagaaaaagatgtccattaatgatagcaacataaattgacgcttccatcaaataatattaaaagacatcacagaagaaaatcttattataaaatatgaaaataattttaagaactaatatatatatatatataatcatttggatgaacaagatatctctttgtcgaaagtttagaaataatcaagcataatactaaggtcgatgtaagaaattgatctttttcaataatacagagttaagaataaaattcatgattatatatttaaaagattaaattatctactaaccatgtttgcacattgatagtatctatatatataatcatagtattaatgaataaattaacgaaagtcatttacattacctgcaacgttgtggtacgctccaagtaagatttgactgttttttgtcaatttcagacaatgacatatacttcttccaatcctcaagcaaaattttaagatcattgactttgttgtctatgccaacacaacaattggcatgcattgttgagaccttgttgaagtccttgctaggctcacaaaaccctccaaaatagttagtgctaaggaacctaatcttcagcttcatgtgggaaattaaggggtgtattttgatcttgttgaacacagcctgctcacccaaccctgggtactctttgctagagttgaaccagaacttattaaaccaaatagttcggttattcgattttatatatttaaaccctccatttggatagttgtgtatgtcagaggagttgccattgaaagcatcacaagctatttggaaatctgcatcttcataaaattgcttgaagggatctctaagccacattatatcagtatcctgcaaaggaaaacaaagaaaaacaaaccctttaacttgcagttggcttgtgtggtagagtatgtgcattgtaaagatcttaagaagctttttttttttttttgcaacagaaagacatgtataattgtatatatatatatataatatatataccgtgaacacaaagttatatcccatctcaagaacagaggtgaggaattcagttcttctccacatcatgtgtaggtatgttggggtcatgaaaaatacttcaccggtgaaattggcatgcacctttagtttcaacttggtaacaatgtttgtgcaaagcaaggcaataagcatttgtcttttggtcccaagttattaccaccatgtgatttaaaagccattgtgtctcattccctaggcgaaaactctccagaaagaggtcaaatatggaacctggctttgcccatgtgatatgcatccagcatatggtcctttccaagcttttcaaagccaaaatcattgataaacagcttagaattgcatatgatcatgatagttgtcgatgatttcgttatttttaagtgtcatgctaattggaacataattgcagcaggaaaacacttcattcaagccaattttgagaagttcaggtcacccacgccccaagcttgaagacgcacgctccaggcgtgggaaggagcttagtttggcaattatgactggaagtccacgccccaggcgtggggagccacgccccaggcatgggaaaaggcctccatcactgattcttgctgccaagccacgccccaggcgtgggactctgctatctgtgcaatttcgaagctaatgaagggcagtcttggattttcacttcctacttcataaataccctcttcctcagacttgaacacacgattttggagggagaagacactattctagggtttagaagctttgggcactcttagtctaaggttggaggttgaagaccaaggtggggttcctccttcatcttcttccttcttgcttcagctaggaatgttcctttttgtaactcaaccacccattatgaggtgtggctgagcatttattgtggttagggccaaagcacttaatgtaaatctttattggatgtattgaatgctattgttcatttattacaagttattttactacactttgcatttctcttccttctcttgcctagacttagctaacctagttaagagcttagagctttagttcacaatagacatattgggactttagtttctgacctaagtgtggtaacttgctaacattgcctagacataggggtgggtgcttgcaactttactcatttatgtgtttgcttaatgcttaacttgcttaagatcactaagagattagggttggatggtaggttaaagaactaagtggaagagacatcaaagcttagtcaacataaggaaaacacattggttgaataacttggataatagaacgtagtgttcaatatcatttcatagagaggcacattgagtgtgggttgccctagctacatttccttacacatcgttattttctcacttgctttgatattaatttccgcttgtttttagttataatttccttccatcgattcacacacacacaaccacaacattacttcattattttggtatccaacttatcgatcgaaattatagtctatttggccaaacaatcctcgttgggaacgacaaatccctttcttccactttattacttgagcgaccggtgcacttgccgtgaacgcaacaagtttttggcgccgttgccggggattgttttagccaaattcattataactttttatccttaagattggacttattttgtttctaacctgcttccagagtatatgcgaggtactgttagccctgaccatcttcagtttgatcctgaaatcgagaaaaccgcaaggaggaatcgaaggctaacaagactaagaaaggaagcagaggggtctagttctcaacctcaagaagaagaaatatttgaagaggaactagacatggctgagaacaaccgtgagcagccaaggccagaggacgaattaatggagaacattcttgctccattgtttgtccgtccagctcccagcatagtgaggccaccgattcaagctcatcatttcgacatccacccatctcttatcagcttggtggagaagaatcaattcggtggtgaggatgatgaggatcctcacagctttgctgatcatttcatgatgatttgcgacaccatccgccatcagggagttacagatgatgccattcgactccgtctctttccattcgccttgaaaggaaaagcactcaggtggttacaacgtcaaccatcaaatagcataaccacttgggatgagttgatggcaagattcttcgctgaatacttctctatggagaagtataatcgtttggtgaatgagatcaccaactttacacagcgagaaagagagactctgtgtgcggcatggaagaggttccaagagttgatccgactttgtcctcaatatgacatgtcggttgggaagaaggtgcgaatcttcttcaatggtttgttgcctgaatccaaattggtgattaacggagcagctggaggaaccatcagatcaaagaccgctacccaaacatatgaattgattgattccttggcacgaaccgaaaatgaaagcttggcaagtcagccgaagagggaagtcattcatttgggtagcacggatgcaatgttggctgagcaaaaactcctatcacagcagctagctatcctcaatgctaagattgacaagcttgaagtctcaaaagcccaagcttcatcgatcaaggcaagcacagctgtatgtgaatattgccaaggggaccacgagtctaatgtgtgtccaaccttagtgggggctgatccaattcaagtcaatggggtatggtatgaccaaaggccaccacaaggttaccaaagaaactataatcaagcttctgggagcggaagcaactatccgagaagaccatatgggagtggtttggattacaagtccaacaattacttacaaccacctcccatccctcccaaagaaccatcggagcttgagaaagctatgttgcaattggccaagaccaccaataaccacatacaaaatactgatgcttttatgaatgagactaggtctcagttgaagaatcaaggagcttctatcaggaatttggagacacaaattggccaaatctcaaggcaactagctgagagaccaccaggccaattccctagtgatactgttgtcaatcctagggaacatgctaaggccatcactactaggagtggcattgttattgctccaaaggagaaggttcaagtggtaccaagagaagaggagaaggggattccacacgccaatgcagaaattgaaaattctgcagtagaaattgaaaattctgcagaatttgagaattctgctacatcagaggttcctcacaacctcaaggagcaggagaagaagaagggaaaggagaaagccacatctgagtctaaaccacctctggatttttccagatttgagaagcctccctatcccttgaggacgaagcagcaaaatcaaaaaaagcagtatgccaacactactacagcaagcattttttacgtcaccaaatctaagtcggttgtaatatagccgatgttaaatcaagttcagtggcaaaatcataataaattgtattttgtttgatagacaacgtcgggttttaagtgaccgtagttgttctttaagaaacgaagtcggtttgcaaaataaccgacttagaaaggattaacatttaaaaaaaaagattaaatttttatttgttttaaaaaaacctagtcggttttctttagcaccgtcgttgtattatgccttggcaaagtcggttttaattttaaccgactatgaatttaataatacaatttttttttaaaaaaaagtaagtaaaataaaacctattataagttggcccttttcccccggatgccctaaaagctcaaacgtgcccgtgccccttcgacctaagctcaagagttggtgttcaccactgaagcctcaaagcccccttcgacgccgcgattgatcaaaaattacgactattgcatcctcaaaggtaagttttaacttgtattcttcagatattgcggattccttcatcgtcattattgttgtttgattttatttgcagaagctggttcgaagagtgtaggttggccaccccgacaacgaatatcaacatcagtgccgacggcgagtggtttcgccatgtagtctgccgcaagtgacaagaggtcagggatccctggagctagggttcacctttcattcgaactcctgttggagtcagacgggttcatttgcaggtaacattctacacttagctgctcatctggcacttcaattgaaagcattgtccagttttagagcaaccattgaaatgcaaagataggtcgcatggttcaagctaggtcaatgttttttatttttaatatcttaactacaaacagtaattcgcaagtcatttcatacacacacagtaattctctgcaaataaaaatgaagataaaacagatcagagaagtaaaaagagatgaactcatgctgccaaaacttcaccatcctaaaagtgaaagaaaaaaactaattaagacctcattcggtgttgcaatgcatgatgtaagattgcattacacaacattaaatacattatatatatatatatatatatatatatatagcagctgcatccatttcctcgaaatatagtaaaacaataaaaagatttaattcaatcagttaaacatgatgtattataaacagactttaattcctatgatcaaacaaaaaatatagtaaagcaagaccttactaaatcataaattcactccttttgtacgatgctaattaatctacactaacttttagttttccccaatctaaatagttgatacttgtggtccagactaaatagtctatctaaagcaccttctttaatgatgacttaaaatcttcttcatattcaagttaaaatagagaaaaagatatattataactggttttcattttgatttgcttaatcataaatcatcagatgataaatatttcagtggtccaactagcagaaatcaaccaaactcttgactgattccaagatgaaccttccttattatttcatactaataaaaaatattgtaccaaattttaattagtgtaaggccatttcgaagagtacatagcaggcagtttcactaaaaatatatcaggagctacatgctatagactatagactatatagagtatatagtatagaccccaggaaaaagatctgttgggccaataataaagcatttataaattgtgagaagggtatgactctgataaattatatattaagatagacaaagtagcagaatgcgagtaaagttaatggtggatccaacccatttgagtttgttccaaaccacacacattattgtcatcttacacttcaagtctacctatttccctcatgccaccgtctctcacttttcttagtgtcccaatgctttctctttctgaactgtgtgaaaagggagtactttgcagccactttggggaaaaatatttccccaatgtggatgtggctttctcaacttttagtacaaaccctctagtttcctactgccgtgaatgattagtggaaggagatttggggaagatccctgtgcatgtttattactttaatctgaatagtttactataaaaatgtttgtagagctcattcttttttacatgaaccaattataaaatgagatatagttagctgtatagtgtatatattccaaccatgacctttcaccaaaagttttttttttttttttaaggatccccaaatgttttagtaatagattaatcaccattcatatgcatataaataggaactaccccccttcttcttctggggcctaaagagaaaggctatgccaaaataaacacatacacaccaactcttatataattactttagtttctcttttattccatgattatttcacatattatgtaccaaccaattagggttgttttgacaagtgtggaattaagcaagaagtttctcaatttatcagacaaaatctctctacgcgtttgaggtttttttatgtcaccgctgaggtgagagtttagtgattcaattgattaaccagctaatttttgtgcatggattattattattgtttcactttcatgaaaaaaccaaagactattgtcatttttaacaatcattataaaatcaagtctggccaagacggttatggtcttgatgctattttgatgtattatcgtcaagaaaatgatgggtcggggaccatgaattgtttcatcaatgaattgcctacctcgtgtcaaattctgtggtcaagaaaatgttggattatatatatatatatctcacaaattggcaaggaaaataaagtcctcctcggtgccttaattaggtggtagcattggcgtagcagaagggattgagagaagagttttggtaggattgggaaaagggttgggactcaataggcatagaagagggcaaaggagagaaagggaaggaagagggtggtgtcatgttggggttggtcaaggaaaggtttctggtataagaagatgggattgtttgggaggtgtttgtggcggtgcttgttgctgaacaaacttgcacaggctttcttgaacggtttctgcctctgtgcatgtgtctttcacagtacttggagtctggatatgcctcctttgagcatctccatttcttgccatctgttcttctgcacctccctggctctgggtctacttttctgccaaatcccatttcaaaacatccccacccaactgcagccagagaattatgacaacaaaccaggctctaaattttatttgtccctcataaaaagtagacatatataataataacaactagtgtattttatttttttttaaaaaaaacagaaaattatccatggccttaaaaaaacatgagtaacatgctagcaaaagcacttactgtcttacttggatgatgtgggaagagccttgaagaaattgaagtgtctacatttcttttaatagagtagatgagatctggtgggataggtgttcctgtaaccatgtacttaaaaacaagagcttgatgctcaagctcttgccactgagtttgcgtgaaaggagacctatttcttgcacttgcactcatcattttgagacaacaaaaacaaggaagagtgtgtgtctctctctaaaatagtggtgaagtgaagaacaacaagatataagatttcaaagagtgaaataaagactaaagagggtttaattttatttctctagatggggtgatagtaatttggactttggagggtcattttttttttcaagggtagatagagattcttctcctgtgcatggataacactaatggctctgagagtctgatgatgctttctggctttgctgccacctcctctctatttctctaatgtgctggatgatgggtgagtgagtgagtctgctcttataatgattgcacctctgtcgcttctgttttttcctctgcaattgccttggttgctgcccttgtctctaacatctttacagaaatccataaacaaatgtacaaaggaaaagaagaaaaattaaattcaaatgcatgttagtccatgcacctttggttttgctgtctccccatcacttcatggaaaacagtgtcatgccatccggttatgtgaagtgtaagctgcttagcaatagtggccattagtatatcaaattatcaatctctctttgcaatggtagtaactttttgaatgaaagtctcgtacgtgtcactttttaatcttttttggcttcaagcatgcgtggcgttatctcattgatagatttggaggccaaggctagagctgaatcctgctttttttggccactgattgatgctttctcctttttttcatttcaccccccaaaacccaaacatctcactttcatcagtggaattagggttacagtcaatttggcctttaactcttattgaccaccgtcttgtcaataggccatcataaccctttacatgtttctccttaatcattttcatgaccacaaaatgtcaaaaccaatattcatcaaacattatggtaattgaaaaacacagaatttcaatgtatcttttcatgcttgagttagagttttaactcaatgataatcggaataatgaatgttttctaagatgaaggtctaataatgtgtttgaatttacagtgaaaagtttaaagtcaggtgaaataattaaatgcctgaagataattatttatccttttttacatgtatttttaataatattatttaaattaaatatgattattttaaatgataaaattattttttcgaacattttaaatattcaggacttgaatccaaaataacttattaagttataataatttcatataaattaatccatattcgtgataataaaattggaattgattatgaaaaaaaaaatctaattcaaacactattttactttgtctttcgaaaaatttgaattgatgttgacaaaaataaagtcaaattaaacatgtcataattataatttagaaagcaacaatcaaaatatttcagataccgcatctgaatttctcgcaattaaaaatcccaaagaaatgattaactgtaacaatgattattcagcagtttaaacttcacactcccaactttttggcaactaaccacaataaaaaatgatagtgtattctatgtaattagaagtttagaatgacttacaaatagaacaattcaagtcaagcacaatgataaattaatcatgtcttcggagactccaatgcatgttcaaattaaaaatcagtcaagttaggattatgcaagcaatacacacatagttgtaattttaatgttatcataatttactattaatattaatatctatattgggttgattgaattaattggatatgaaactcataaattcaatatccagcctaattattattggataagttaaaataaacccaattcatctttctaatccaatccaattctgaaatgttatttagataggtagagtttatcagatttccaggtcgattcataccagtctacacccctgttatttgcatttattcccatattttcacagttttaaagatggcgacatcaccataacttaatacactttttttattatatgtaattcattgttggttaaagttgtatcaatattttgaattcttttccatggaaaaactaaactttagcatattctttgatggtgagatcgagacccattctagccggcatttgaagaaagaaaaaatatcttcaattctttgaccttaattatctcccaaggtgcgattttcagattttgcaatgagatttattattgtttcagtttatatagaattatatactaagtttctcttacattagaatatttttattttaatacctattatataagaaaaattagaaatgttttccaattcctattagtcacattattactcaactagaaatattgatgtcatagattaaaatgaaaaaaaaaaatattaaggaccaaaacagacaaacaaattttaaaaaaccaaggcgaaaaccattatatatttttgtcgcgtgatttgaatgttctcattattaaaattgtgtaagcaaaagttttcccaacattctctgttgatatactttttttgattttttaaagcatatactttaaatgataagaattcaaagaggtgaatggaaaatcttataaaaagccaaagaaaaaacgacttatcttttagttcatatattaaagttgcaacatcaattttttttatgatctacttaattgcatcacaattacaatagatgttaggggcacgagtaagtcagatttggtctattttatgatccaacctaataaaatagaattgagttcggttgggtcaaatttgttctcttttgtaaacaacccaaagcaaatctagctgtttaaggttagtttgggtagtttttcttttagtatgacaataaggtaagattacaaatgagtaaagagggtgcctcattcatatgcagcataagtatgaattatggcctctggacactaggagaaaacagtaaagacatgttgagatgaagagcctttctttactagaaaatctccatagaaattccttctcgcatagtgtgttgaaactttaattgtcaaagcatttgccattgtaaatgacaaataatttcacattcatatttgttgtaaaacctggacactcttctttttttttttttgtgttcttttcttgttgaaatatattttcttttcttattgtgatttgttaaaatctgttctgtcatagggtatgtgggatgttacttgcacccaatgcctgattcaatattgttcttcaaatcaaattacttatgtccaaattatacatcgctaccattttgcatctcacttaaaacgaatggcagttgttgtttgcattcaagattttttttcctttgtgaatgtttgtgggttgctcatttgtttagcagctatatatgcctttggatacatgcatgtttcccaattaggtccttcttgatttaagttgcttcttaggtattatgtactttgccttatagttaatgaatccatgagttgaggtttagacttcataacactctgtagtatcatatattttaggggttatggaatgctcaataatataagtgagttaggaagaagcaaaaatgatttgtaaatttttgtgcgaatctgtcagaacttcgatggctttgctagaaatctaagatgaaggtctgagttgtttcagctgttttgtatcttgaccagtactccttgtactgtttctatatatatatatatatatatatatatatatatatatatctatttttgctgatcaaaaaaaaaaaaagaagctattagggtaaccaattcccattaggattgtggacaaagaaacaagggtgagaagttgcaaaaagtagtggtattggccttctagtcccatgtgatccctagagtgaaggtggatgagaagaaattgttgtgcaaaagctatggctcctaacaaatgagttaactgatattgagctttggagcataattgtcaagaactatggcaaaggtgggatagaccaagaaggacatagccatggaggagtgttgaaagttgtggacatgatctgagggaatggatccatcagggttgaatggatggtgacaatccggagagatgaagagctccaaggcaatgaagattgtgcagcttgttattatgaagttgagctgcaagtatctagattttgtggtgggaaaccataggcttgatgtatgttaggtactggtacagaaaagaaaagagaacgaaagttttattcaccacacacttcttgcttacactgtcacttcgagggtcaccacctcctaaagaattccctcccctgatcccctctcagtgatcccctttatacatttctctctcccctgttagttataactaactcaacttagttatactaacaattaaattgctatctaaaccctctttcataagtttgaccccacctcctatcaatgtaggacttggaacaaagggcgtggagcttgatgtgcttgaacaagtgccataaaccaattacaaagaagccaaaccccaaaacttgatgtccctccaacatagtgcctgttaggccaacacaataaaaagaaacttaggttatgtttcgatcgataatagttaggaaaatgttttgtttagtcagtaaaaagtaaataaatataatgaatttataataattcacacattgtattcaaccaattaaataatatacatttacttgatacaaaaaaatacttttaagaatttcaatatatatttcaaatatatatttgggaataaaagtattttcaaatttttccgacaaaaataatctaaacatgtacttagttgtacttagctggtattcttgtcccacagcctgctcacccaaccctgggtactctttgctagagttgaaccagaacttgttaaaccaaatagttcggttattcgattttatatatttaaaccctccatttggatagttgtgtatgtcagaggagttgccattgaaagcatcacaagctatttggaaatctgcatcttcataaaattgcttgaagggatctctaagccacattatatcagtatcctgcaaaggaaaacaaagaaaaacaaaccctttaacttgcagttggcttgtgtggtagagtgtgtgcattgtaaagatcttaagaagctttttttttttttttttttgcaacagaaatacatgtataattgtatatatatatatatatataatatataccgtgaacacaaagttatatcccatctcaagaacagaggtgaggaattcagttcttctccacatcatgtgtaggtatgttggggtcatgaaaaatacttcaccggtgaaattggcacctttagtttcaacttggtaacaatgtttgtgcaaagcaaggcaataagcatttgtcttttggtcccaagttattaccaccatgtgatttaaaagccattgtgtctcattccctaggcgaaaactctccagaaagaggtcaaatatggaacctggctttgtccatgcatcgtttaaagttgtgattatcactgtcttatccttcatagacgcggttctaagaacactctctagcttcgattcataactaacctgacgcataaagccaaaactacatcaaacacttggtaacccaagttcatattcacagatgaaattttcatgagacaaatgcaaagttaagattaacaaataacaactagtttgccatatgcttgtcaaaaagataaaatagtacaatcccttagtgcaaaagcatcaagtgtgcaagaaatcaaattatctgagatttatgtaacaaataataatccacaatggttagaaaaaatccaaaaaaaaaagggcaaaagttgcaagacatcaaataggaagtgaaaagtaagtgatgtacacaaacttctaaacatcaatataacaaaatggtaccctccatttacatatataacaacaagactagtgacacatatagctattttgggtgaaaattgtatacaaattctacatttgtagtgacctccaagtcctcataattatgcaaagtatatatacaaatacagaatggtagcagacagtgtgaaattagcacgtaaattatcattattgatcatggcatccacaaaagaataacatctccaaaaggaaaatgcatatttattctttttccagttatgcatcaataatcaaacaattaatgcatcaataatatcagaaatcaaaggaactaatattataatttaaacaattaaataacataattaactaagtacatttccaccaaaagaaaaacctaaggtacgtttattctcatataaatgctgataattcaaaaacttacatgcaacggggaatcagacataaccgatcaagtagagaaaatttgttgtcgctatcttaaattacgaaaccagaatgtcaatgtcaatagttgaagtttgtgaatgtttgttcattaataaatgattttcttcaatgtgttatttaatttcgaattgattagctgtcccacgtcggatgaacttctttcttgagcatccttgaaagcttatatatatatatatatatatataagaaacttaagtaaggctttaagatctatcccatttatcttataatagctttcattgttttttctctaagagaaaaattcggagaaaaaatatagttttcctatgaggtcttttaagtattttattttcttatttttaaaagagattgttaatatatattctctcattgtattttaaagagaggtcatgcaatctctttcagatggtgaaaatctcttatattcttatatgtgggttttccacgtcacgttgttactcaaatacccaaataatacaacccacttggtcaatatagtcaatattttggtatatagtattgtttcaatatacagtatactatccacggtgtggatattgttcacgattactacgcacatgttctttagcagagattgtcaacgcacaccatattaacttgttatagtattgtatatacagttgaaaaattattttgtgttaattaaaggaaggtggaagttaaggcattaggataagaattacaagagaattaaggatgacaaccaatacgatttactatagaatttattctcgtgcgctgagctcgtttccattaagctggaattttatccattatgaatattttttacaagtacttataggatttagtaaactgtcatccctagacaataatataaactaaataattcattcttgacttttcaactaactgaccaagagagtttatatatgactttcttaggacttcaataggacttgcttaatcagtcaatttcctaattcatagaattttaaaactatcttaattgatctgattgtgacctactttccaaaatcaaactaactcaaaagcttgatcacagaatttgatttttaatcaagtttttcactaaaattattctttgaaggagtggaaatccaagatattctcatgaaaaaacaaattatatatatatatatgtataatttgattctttctggaagtaattactaacaacactttttaatttgattcttataaataagaaagggaagtacgtttatgaaaatgataaaaatgtcatttcatttttatttggttgattgcttttaagaatttacccaaaaaaagaattattcttttaaaagaaagatttttttatccatttgcatttttccataaactaaaatcatattaattcctaaaaatatctctttattcagtttcttatttttaaaggtttcttattaaataaaactaggttaaatttataaaaaaaaacaatataatgtctttgtaataatttaaaaaagtgtatcattaagaataaaatcataacgaggatcccataaaaaagtaaaatagataaagcacacgtcaattaccgagtggaataatatatatatatatatatattatatatatataagaaataaactattatataatttaaactttgtgaaagaaccaaattaaaagaaaaaatattttactgaaattaaaatatttagattatgaaaatgctaacatcaattattagggttgataatttttaattttaaaaattattttctaattatataaaaaaattggaaccggacttggatctttaataaggaagatttcagatttgagatggaaaaaattgttactaaaataagagacattgaagatagcaattatagatacttacaacactaacaaaggtgactaaaaaaataccaatatcaggagagagaaaaaaacaacaaaaagaatgaaatattagctctaactttgttttgaaaaaaattaccgtaaataaatatattggaaaaaatagcataacaacgtaacccacaaagcataaatatattgaagaataatccaatatgacccacaaaagcaaaaaagcttgatcaacccaaatcagaagcaagcttgaacgcaagagcaataacaaaagcatcaaaaccaaaaattcaactttttgattggtttgcaagataaataagcaaaggccaacacccagattcactcatttcattctcctctattttcaccacgataattgcaattgcaaaaggcaacttggcatgcacagactcacacaaacacacacatatatagtatagatagatagaataaatagagagagagaaagagagagagagagagagagagactcacctttgttgactgagctgtgaagtaatgtgagaaggtatggaattcaatggaagaggcagagttagagagaaacacccacaacacagcaagcccagcaatgaacatggttaattgcatcacccttctcaccaaaagctggtagctaccggaaccccatgccttgatgccaccggcattctccaccgcagaggtgtccttcttcatgttgtttcaagagctgatcaattgggttgcaaaaatagtctctctttgactattcttaaagaacttgcttctactttgtttcttcttcaacaaaacagcaactaatatggttgtactttttaagatacgttattgtttgactgcattcacaataactgttaatctattattacttttatatatctttcaagtatatattgtaaatcaatcttttatgtaaggtaaattaatacaatttatattatttcatacgtaccattaattgttgtgtattaattgttgtgtcttgtataataataaaaaaatcttcatcatatataaaacttcgttgtgattaatgctactgttttgatattaaataagttggttatttgtttaatctttatataataaaaaaggaaatttgaacacacttttttccatccagaaacactttagacatttttttagttattttttttaacaatagctcaattagagtgtgaatctcaattaagaacacttgagctttttttaacatttctcttgtacgaagatgtgaatctcaattaagattgccttcaaaaatgaatactcaggttttggtttaagtgaaaggacaccctggacgtgagaatttgctagttcttggtgaagttgaaaacacgtgtgatcagcaacaatgacattggctttggacggctctagtagggtaaaagctcaagcgattggcagagctagatgatcaatttatatcaagagtgatgatatatagatattcataaatcataaatacctatttgatatatttttttacatgattgataattttattattaaattacatgaatgctcgttgatgaggtatgtaatggacatgagatcatcctttggagagtgctgagtgcactgaatgcaacaagatagttgaaatcaatatttttccgcgtgagtttagtcaagccaaagggcatgcagatgaaagagtttttcctatcactaggctgcaattgcatacttttggtgtaacctatttactaagtattaatttactatatgtattaaaaacatgtcttctttttataaaataaatgccctctttaatacacatgtcacggttatgtactttatgttatgtactttattttttctcgccaaaagaatctctgaaagtttaccttgtttaaaatcctgataaaagcaggtatccattagcttgtgatcatgtcctaagtccaaccacaagtaattactattagcaaacaactcttaattggcacaagataaatggtctggacaatgcttcattgagttccaagtactaaatgcatgtacatggtaggcataaaattaaagttattacttcgtcttgcatttattacttacgagcaattcacgcaaaaaaaattctggtcaacttgcaacatctcatgcatacatcatatgatttatttttaatagctgatcttataaaataaataaatatatatataaaacgtaaaacacaccctattgtcgatatcctctatagtcaatcaaacttaataatcaacaagtcattcgtccaaccctttactatatgttcaggagttaaatcttgactggcaaaatgtaaattaaattagtcaaaataagtaaatatcgtttttatttaatttaattaggtaaaaatataaaaatgttaaatatgcgaccatttgaaggacacttaattttctcattagtaaagaaaaggaaatgctcttaaaaaaatattaaaaagaagttaagaacaaaattaaatgtgtttaacttcttgaatagtgttagagggcaaggccatgcagaaaattcttcatcatgagaagtttagtgtcacgtgagataattcaggaatctggaagtgtctcttgaaggagtggtcgaaattgaattgtgatggtgcatattctcgggcagccgatgttgcttcatgcggtgttgttctttgcactagtcgagtaggcaattttattcaaggaggcttggacattgctctatctattctgaaagtggagctgttggccaactatttttgggattgcagtggaactgttgtgggaattccgcaatgaccctgagtcctatctt

SEQ ID NO: 41 - DNA, 2515428 bp, Glycine tomentella; identical to SEQ ID NO: 2
  misc_feature (2518)..(2998): n is a, c, g, or t
  misc_feature (36286)..(36599): n is a, c, g, or t
  misc_feature (36872)..(36881): n is a, c, g, or t
  misc_feature (65098)..(65189): n is a, c, g, or t
  misc_feature (91979)..(92044): n is a, c, g, or t
  misc_feature (103399)..(103465): n is a, c, g, or t
  misc_feature (108489)..(108498): n is a, c, g, or t
  misc_feature (109073)..(109082): n is a, c, g, or t
  misc_feature (110439)..(110448): n is a, c, g, or t
  misc_feature (114969)..(115015): n is a, c, g, or t
  misc_feature (117523)..(117532): n is a, c, g, or t
  misc_feature (119983)..(120104): n is a, c, g, or t
  misc_feature (147407)..(147539): n is a, c, g, or t
  misc_feature (148147)..(148147): n is a, c, g, or t
  misc_feature (148448)..(148543): n is a, c, g, or t
  misc_feature (151690)..(151746): n is a, c, g, or t
  misc_feature (152026)..(152272): n is a, c, g, or t
  misc_feature (155219)..(155271): n is a, c, g, or t
  misc_feature (160392)..(160454): n is a, c, g, or t
  misc_feature (171648)..(171859): n is a, c, g, or t
  misc_feature (177208)..(177279): n is a, c, g, or t
  misc_feature (178199)..(178208): n is a, c, g, or t
  misc_feature (191490)..(191619): n is a, c, g, or t
  misc_feature (194974)..(194974): n is a, c, g, or t
  misc_feature (196069)..(196069): n is a, c, g, or t
  misc_feature (196368)..(196600): n is a, c, g, or t
  misc_feature (208015)..(208015): n is a, c, g, or t
  misc_feature (212728)..(212812): n is a, c, g, or t
  misc_feature (213179)..(213270): n is a, c, g, or t
  misc_feature (233294)..(233303): n is a, c, g, or t
  misc_feature (252827)..(252827): n is a, c, g, or t
  misc_feature (259658)..(259791): n is a, c, g, or t
  misc_feature (262066)..(262133): n is a, c, g, or t
  misc_feature (262439)..(262704): n is a, c, g, or t
  misc_feature (269209)..(269218): n is a, c, g, or t
  misc_feature (270030)..(270039): n is a, c, g, or t
  misc_feature (270849)..(270858): n is a, c, g, or t
  misc_feature (271823)..(271844): n is a, c, g, or t
  misc_feature (277888)..(277935): n is a, c, g, or t
  misc_feature (278275)..(278284): n is a, c, g, or t
  misc_feature (278614)..(278630): n is a, c, g, or t
  misc_feature (283365)..(283365): n is a, c, g, or t
  misc_feature (292154)..(292154): n is a, c, g, or t
  misc_feature (294898)..(295033): n is a, c, g, or t
  misc_feature (303145)..(303509): n is a, c, g, or t
  misc_feature (327149)..(327149): n is a, c, g, or t
  misc_feature (345182)..(345191): n is a, c, g, or t
  misc_feature (345689)..(345698): n is a, c, g, or t
  misc_feature (347234)..(347243): n is a, c, g, or t
  misc_feature (354646)..(354974): n is a, c, g, or t
  misc_feature (355279)..(355288): n is a, c, g, or t
  misc_feature (366049)..(366049): n is a, c, g, or t
  misc_feature (387264)..(396263): n is a, c, g, or t
  misc_feature (401298)..(401307): n is a, c, g, or t
  misc_feature (404653)..(404702): n is a, c, g, or t
  misc_feature (411793)..(411845): n is a, c, g, or t
  misc_feature (414129)..(414129): n is a, c, g, or t
  misc_feature (424879)..(425053): n is a, c, g, or t
  misc_feature (436381)..(436381): n is a, c, g, or t
  misc_feature (438890)..(439012): n is a, c, g, or t
  misc_feature (445443)..(445813): n is a, c, g, or t
  misc_feature (446434)..(446520): n is a, c, g, or t
  misc_feature (448528)..(448528): n is a, c, g, or t
  misc_feature (449746)..(449755): n is a, c, g, or t
  misc_feature (451579)..(451618): n is a, c, g, or t
  misc_feature (451827)..(453537): n is a, c, g, or t
  misc_feature (453971)..(454045): n is a, c, g, or t
  misc_feature (454682)..(454729): n is a, c, g, or t
  misc_feature (454995)..(455028): n is a, c, g, or t
  misc_feature (458579)..(458801): n is a, c, g, or t
  misc_feature (471895)..(471896): n is a, c, g, or t
  misc_feature (473644)..(473695): n is a, c, g, or t
  misc_feature (475540)..(475549): n is a, c, g, or t
  misc_feature (476056)..(476297): n is a, c, g, or t
  misc_feature (476716)..(481095): n is a, c, g, or t
  misc_feature (483544)..(483583): n is a, c, g, or t
  misc_feature (494682)..(497556): n is a, c, g, or t
  misc_feature (500976)..(501680): n is a, c, g, or t
  misc_feature (509293)..(509775): n is a, c, g, or t
  misc_feature (510125)..(510134): n is a, c, g, or t
  misc_feature (511429)..(511438): n is a, c, g, or t
  misc_feature (512071)..(512080): n is a, c, g, or t
  misc_feature (520829)..(520829): n is a, c, g, or t
  misc_feature (535872)..(535872): n is a, c, g, or t
  misc_feature (548634)..(548716): n is a, c, g, or t
  misc_feature (550234)..(550445): n is a, c, g, or t
  misc_feature (556363)..(556825): n is a, c, g, or t
  misc_feature (561399)..(561399): n is a, c, g, or t
  misc_feature (563228)..(563396): n is a, c, g, or t
  misc_feature (569719)..(569972): n is a, c, g, or t
  misc_feature (571088)..(571199): n is a, c, g, or t
  misc_feature (571558)..(571610): n is a, c, g, or t
  misc_feature (574171)..(574171): n is a, c, g, or t
  misc_feature (582944)..(582946): n is a, c, g, or t
  misc_feature (584002)..(584056): n is a, c, g, or t
  misc_feature (595096)..(595105): n is a, c, g, or t
  misc_feature (598699)..(598791): n is a, c, g, or t
  misc_feature (599080)..(599089): n is a, c, g, or t
  misc_feature (601036)..(601036): n is a, c, g, or t
  misc_feature (603263)..(603301): n is a, c, g, or t
  misc_feature (605068)..(605725): n is a, c, g, or t
  misc_feature (612683)..(612791): n is a, c, g, or t
  misc_feature (613113)..(613122): n is a, c, g, or t
  misc_feature (624207)..(624794): n is a, c, g, or t
  misc_feature (627447)..(636305): n is a, c, g, or t
  misc_feature (637524)..(637692): n is a, c, g, or t
  misc_feature (643932)..(644116): n is a, c, g, or t
  misc_feature (646255)..(646264): n is a, c, g, or t
  misc_feature (655076)..(655353): n is a, c, g, or t
  misc_feature (655764)..(655773): n is a, c, g, or t
  misc_feature (664924)..(665368): n is a, c, g, or t
  misc_feature (665811)..(665897): n is a, c, g, or t
  misc_feature (684898)..(684955): n is a, c, g, or t
  misc_feature (686088)..(686097): n is a, c, g, or t
  misc_feature (686785)..(686794): n is a, c, g, or t
  misc_feature (687013)..(687452): n is a, c, g, or t
  misc_feature (696202)..(696211): n is a, c, g, or t
  misc_feature (697137)..(697146): n is a, c, g, or t
  misc_feature (697505)..(697530): n is a, c, g, or t
  misc_feature (698828)..(699334): n is a, c, g, or t
  misc_feature (700134)..(700134): n is a, c, g, or t
  misc_feature (701663)..(701779): n is a, c, g, or t
  misc_feature (705994)..(706003): n is a, c, g, or t
  misc_feature (706275)..(706284): n is a, c, g, or t
  misc_feature (706554)..(706740): n is a, c, g, or t
  misc_feature (739616)..(739625): n is a, c, g, or t
  misc_feature (739984)..(739993): n is a, c, g, or t
  misc_feature (740772)..(740781): n is a, c, g, or t
  misc_feature (747267)..(747725): n is a, c, g, or t
  misc_feature (748024)..(748033): n is a, c, g, or t
  misc_feature (751823)..(751832): n is a, c, g, or t
  misc_feature (752158)..(752167): n is a, c, g, or t
  misc_feature (754755)..(755332): n is a, c, g, or t
  misc_feature (761790)..(761799): n is a, c, g, or t
  misc_feature (770075)..(773141): n is a, c, g, or t
  misc_feature (781173)..(781238): n is a, c, g, or t
  misc_feature (788556)..(788556): n is a, c, g, or t
  misc_feature (798961)..(799024): n is a, c, g, or t
  misc_feature (799264)..(799264): n is a, c, g, or t
  misc_feature (803059)..(803645): n is a, c, g, or t
  misc_feature (806342)..(806500): n is a, c, g, or t
  misc_feature (807057)..(807057): n is a, c, g, or t
  misc_feature (809594)..(810292): n is a, c, g, or t
  misc_feature (810583)..(810645): n is a, c, g, or t
  misc_feature (819075)..(819099): n is a, c, g, or t
  misc_feature (819525)..(819534): n is a, c, g, or t
  misc_feature (823746)..(823746): n is a, c, g, or t
  misc_feature (831993)..(831993): n is a, c, g, or t
  misc_feature (839444)..(840159): n is a, c, g, or t
  misc_feature (860764)..(860764): n is a, c, g, or t
  misc_feature (874264)..(874670): n is a, c, g, or t
  misc_feature (874982)..(874991): n is a, c, g, or t
  misc_feature (875486)..(875495): n is a, c, g, or t
  misc_feature (880231)..(880231): n is a, c, g, or t
  misc_feature (892030)..(892205): n is a, c, g, or t
  misc_feature (900420)..(900439): n is a, c, g, or t
  misc_feature (905126)..(905135): n is a, c, g, or t
  misc_feature (917837)..(917857): n is a, c, g, or t
  misc_feature (918415)..(918483): n is a, c, g, or t
  misc_feature (919195)..(919698): n is a, c, g, or t
  misc_feature (929819)..(931166): n is a, c, g, or t
  misc_feature (936309)..(936309): n is a, c, g, or t
  misc_feature (937617)..(937679): n is a, c, g, or t
  misc_feature (938166)..(938202): n is a, c, g, or t
  misc_feature (948999)..(948999): n is a, c, g, or t
  misc_feature (955232)..(955301): n is a, c, g, or t
  misc_feature (957017)..(957452): n is a, c, g, or t
  misc_feature (957755)..(957764): n is a, c, g, or t
  misc_feature (963372)..(964799): n is a, c, g, or t
  misc_feature (975972)..(975972): n is a, c, g, or t
  misc_feature (980684)..(980776): n is a, c, g, or t
  misc_feature (984316)..(984467): n is a, c, g, or t
  misc_feature (984667)..(985013): n is a, c, g, or t
  misc_feature (985138)..(985404): n is a, c, g, or t
  misc_feature (985808)..(985808): n is a, c, g, or t
  misc_feature (1017314)..(1017402): n is a, c, g, or t
  misc_feature (1021845)..(1021845): n is a, c, g, or t
  misc_feature (1037120)..(1037214): n is a, c, g, or t
  misc_feature (1041307)..(1042192): n is a, c, g, or t
  misc_feature (1043052)..(1043061): n is a, c, g, or t
  misc_feature (1061729)..(1062991): n is a, c, g, or t
  misc_feature (1064770)..(1065153): n is a, c, g, or t
  misc_feature (1065481)..(1065490): n is a, c, g, or t
  misc_feature (1068350)..(1068358): n is a, c, g, or t
  misc_feature (1070628)..(1070664): n is a, c, g, or t
  misc_feature (1073221)..(1073383): n is a, c, g, or t
  misc_feature (1073735)..(1073744): n is a, c, g, or t
  misc_feature (1082661)..(1082682): n is a, c, g, or t
  misc_feature (1083652)..(1083936): n is a, c, g, or t
  misc_feature (1084301)..(1084344): n is a, c, g, or t
  misc_feature (1084663)..(1084672): n is a, c, g, or t
  misc_feature (1087587)..(1087596): n is a, c, g, or t
  misc_feature (1088480)..(1088489): n is a, c, g, or t
  misc_feature (1100633)..(1100693): n is a, c, g, or t
  misc_feature (1103210)..(1103222): n is a, c, g, or t
  misc_feature (1103976)..(1104499): n is a, c, g, or t
  misc_feature (1108036)..(1108083): n is a, c, g, or t
  misc_feature (1108391)..(1108391): n is a, c, g, or t
  misc_feature (1121455)..(1121455): n is a, c, g, or t
  misc_feature (1131796)..(1131956): n is a, c, g, or t
  misc_feature (1139540)..(1139850): n is a, c, g, or t
  misc_feature (1141715)..(1141715): n is a, c, g, or t
  misc_feature (1153053)..(1153141): n is a, c, g, or t
  misc_feature (1158773)..(1158797): n is a, c, g, or t
  misc_feature (1159432)..(1159557): n is a, c, g, or t
  misc_feature (1162619)..(1162739): n is a, c, g, or t
  misc_feature (1163190)..(1163199): n is a, c, g, or t
  misc_feature (1166327)..(1166327): n is a, c, g, or t
  misc_feature (1171052)..(1171076): n is a, c, g, or t
  misc_feature (1171386)..(1171412): n is a, c, g, or t
  misc_feature (1188088)..(1188121): n is a, c, g, or t
  misc_feature (1188873)..(1188917): n is a, c, g, or t
  misc_feature (1190220)..(1194815): n is a, c, g, or t
  misc_feature (1195112)..(1195121): n is a, c, g, or t
  misc_feature (1210221)..(1210724): n is a, c, g, or t
  misc_feature (1221116)..(1221723): n is a, c, g, or t
  misc_feature (1246582)..(1246600): n is a, c, g, or t
  misc_feature (1247090)..(1247160): n is a, c, g, or t
  misc_feature (1252322)..(1252399): n is a, c, g, or t
  misc_feature (1255587)..(1255722): n is a, c, g, or t
  misc_feature (1256438)..(1256447): n is a, c, g, or t
  misc_feature (1264054)..(1264141): n is a, c, g, or t
  misc_feature (1264542)..(1264551): n is a, c, g, or t
  misc_feature (1265445)..(1265445): n is a, c, g, or t
  misc_feature (1270155)..(1270164): n is a, c, g, or t
  misc_feature (1270726)..(1270735): n is a, c, g, or t
  misc_feature (1276069)..(1276088): n is a, c, g, or t
  misc_feature (1285115)..(1285115): n is a, c, g, or t
  misc_feature (1292752)..(1292761): n is a, c, g, or t
  misc_feature (1293343)..(1293352): n is a, c, g, or t
  misc_feature (1296972)..(1296981): n is a, c, g, or t
  misc_feature (1297588)..(1297597): n is a, c, g, or t
  misc_feature (1301879)..(1301888): n is a, c, g, or t
  misc_feature (1302658)..(1302667): n is a, c, g, or t
  misc_feature (1315014)..(1315160): n is a, c, g, or t
  misc_feature (1318709)..(1318990): n is a, c, g, or t
  misc_feature (1319334)..(1319757): n is a, c, g, or t
  misc_feature (1321767)..(1321837): n is a, c, g, or t
  misc_feature (1324303)..(1324656): n is a, c, g, or t
  misc_feature (1327754)..(1327769): n is a, c, g, or t
  misc_feature (1348460)..(1348627): n is a, c, g, or t
  misc_feature (1353754)..(1354201): n is a, c, g, or t
  misc_feature (1354501)..(1354543): n is a, c, g, or t
  misc_feature (1361377)..(1370010): n is a, c, g, or t
  misc_feature (1373811)..(1374519): n is a, c, g, or t
  misc_feature (1404036)..(1404553): n is a, c, g, or t
  misc_feature (1408650)..(1408745): n is a, c, g, or t
  misc_feature (1413613)..(1413642): n is a, c, g, or t
  misc_feature (1418003)..(1418003): n is a, c, g, or t
  misc_feature (1422061)..(1422070): n is a, c, g, or t
  misc_feature (1435965)..(1435974): n is a, c, g, or t
  misc_feature (1436939)..(1436939): n is a, c, g, or t
  misc_feature (1442212)..(1442221): n is a, c, g, or t
  misc_feature (1466149)..(1466756): n is a, c, g, or t
  misc_feature (1488168)..(1488729): n is a, c, g, or t
  misc_feature (1489174)..(1489183): n is a, c, g, or t
  misc_feature (1494640)..(1494771): n is a, c, g, or t
  misc_feature (1495169)..(1495178): n is a, c, g, or t
  misc_feature (1496562)..(1497374): n is a, c, g, or t
  misc_feature (1501256)..(1501256): n is a, c, g, or t
  misc_feature (1519233)..(1519331): n is a, c, g, or t
  misc_feature (1530876)..(1531672): n is a, c, g, or t
  misc_feature (1539501)..(1539510): n is a, c, g, or t
  misc_feature (1550168)..(1550188): n is a, c, g, or t
  misc_feature (1559883)..(1559892): n is a, c, g, or t
  misc_feature (1560261)..(1560270): n is a, c, g, or t
  misc_feature (1560602)..(1560695): n is a, c, g, or t
  misc_feature (1568183)..(1568192): n is a, c, g, or t
  misc_feature (1575847)..(1575847): n is a, c, g, or t
  misc_feature (1580103)..(1580103): n is a, c, g, or t
  misc_feature (1581680)..(1581790): n is a, c, g, or t
  misc_feature (1582461)..(1582543): n is a, c, g, or t
  misc_feature (1598249)..(1598481): n is a, c, g, or t
  misc_feature (1615304)..(1615306): n is a, c, g, or t
  misc_feature (1620936)..(1620976): n is a, c, g, or t
  misc_feature (1622376)..(1622440): n is a, c, g, or t
  misc_feature (1623858)..(1626107): n is a, c, g, or t
  misc_feature (1639782)..(1639810): n is a, c, g, or t
  misc_feature (1657914)..(1657978): n is a, c, g, or t
  misc_feature (1658123)..(1658961): n is a, c, g, or t
  misc_feature (1662215)..(1662290): n is a, c, g, or t
  misc_feature (1662660)..(1662669): n is a, c, g, or t
  misc_feature (1666740)..(1666813): n is a, c, g, or t
  misc_feature (1671811)..(1672574): n is a, c, g, or t
  misc_feature (1673048)..(1673065): n is a, c, g, or t
  misc_feature (1674791)..(1674800): n is a, c, g, or t
  misc_feature (1675163)..(1675172): n is a, c, g, or t
  misc_feature (1678279)..(1678404): n is a, c, g, or t
  misc_feature (1678859)..(1678899): n is a, c, g, or t
  misc_feature (1684450)..(1685029): n is a, c, g, or t
  misc_feature (1690393)..(1691192): n is a, c, g, or t
  misc_feature (1698905)..(1698905): n is a, c, g, or t
  misc_feature (1713749)..(1713758): n is a, c, g, or t
  misc_feature (1714429)..(1714438): n is a, c, g, or t
  misc_feature (1721212)..(1721719): n is a, c, g, or t
  misc_feature (1722067)..(1722269): n is a, c, g, or t
  misc_feature (1733874)..(1733908): n is a, c, g, or t
  misc_feature (1743304)..(1743899): n is a, c, g, or t
  misc_feature (1744231)..(1744265): n is a, c, g, or t
  misc_feature (1748110)..(1748890): n is a, c, g, or t
  misc_feature (1759134)..(1759143): n is a, c, g, or t
  misc_feature (1762830)..(1762889): n is a, c, g, or t
  misc_feature (1771366)..(1771373): n is a, c, g, or t
  misc_feature (1775112)..(1775509): n is a, c, g, or t
  misc_feature (1782687)..(1783942): n is a, c, g, or t
  misc_feature (1792376)..(1792451): n is a, c, g, or t
  misc_feature (1802175)..(1802222): n is a, c, g, or t
  misc_feature (1803101)..(1803115): n is a, c, g, or t
  misc_feature (1804607)..(1804627): n is a, c, g, or t
  misc_feature (1807679)..(1807679): n is a, c, g, or t
  misc_feature (1815540)..(1816276): n is a, c, g, or t
  misc_feature (1816730)..(1816739): n is a, c, g, or t
  misc_feature (1831257)..(1831321): n is a, c, g, or t
  misc_feature (1840114)..(1840183): n is a, c, g, or t
  misc_feature (1841183)..(1841192): n is a, c, g, or t
  misc_feature (1853078)..(1853247): n is a, c, g, or t
  misc_feature (1866798)..(1866807): n is a, c, g, or t
  misc_feature (1867100)..(1867109): n is a, c, g, or t
  misc_feature (1867744)..(1867800): n is a, c, g, or t
  misc_feature (1868124)..(1868163): n is a, c, g, or t
  misc_feature (1872772)..(1872781): n is a, c, g, or t
  misc_feature (1876847)..(1877364): n is a, c, g, or t
  misc_feature (1880122)..(1880122): n is a, c, g, or t
  misc_feature (1885134)..(1888261): n is a, c, g, or t
  misc_feature (1908210)..(1908210): n is a, c, g, or t
  misc_feature (1917391)..(1917806): n is a, c, g, or t
  misc_feature (1938336)..(1943444): n is a, c, g, or t
  misc_feature (1943733)..(1943742): n is a, c, g, or t
  misc_feature (1965086)..(1965095): n is a, c, g, or t
  misc_feature (1965460)..(1965469): n is a, c, g, or t
  misc_feature (1972085)..(1972791): n is a, c, g, or t
  misc_feature (1973111)..(1973122): n is a, c, g, or t
  misc_feature (1974857)..(1974935): n is a, c, g, or t
  misc_feature (1975220)..(1976196): n is a, c, g, or t
  misc_feature (1977813)..(1977865): n is a, c, g, or t
  misc_feature (1978144)..(1978215): n is a, c, g, or t
  misc_feature (1988350)..(1988667): n is a, c, g, or t
  misc_feature (1992044)..(1992053): n is a, c, g, or t
  misc_feature (1992564)..(1992575): n is a, c, g, or t
  misc_feature (1993922)..(1993931): n is a, c, g, or t
  misc_feature (1998316)..(2001666): n is a, c, g, or t
  misc_feature (2007006)..(2007034): n is a, c, g, or t
  misc_feature (2022891)..(2022963): n is a, c, g, or t
  misc_feature (2023545)..(2023545): n is a, c, g, or t
  misc_feature (2030200)..(2030333): n is a, c, g, or t
  misc_feature (2033148)..(2033157): n is a, c, g, or t
  misc_feature (2033672)..(2034130): n is a, c, g, or t
  misc_feature (2040204)..(2040649): n is a, c, g, or t
  misc_feature (2040932)..(2040941): n is a, c, g, or t
  misc_feature (2043444)..(2043444): n is a, c, g, or t
  misc_feature (2044607)..(2044616): n is a, c, g, or t
  misc_feature (2044965)..(2044965): n is a, c, g, or t
  misc_feature (2045720)..(2046417): n is a, c, g, or t
  misc_feature (2048728)..(2048737): n is a, c, g, or t
  misc_feature (2054225)..(2054315): n is a, c, g, or t
  misc_feature (2055747)..(2056110): n is a, c, g, or t
  misc_feature (2060336)..(2062932): n is a, c, g, or t
  misc_feature (2064549)..(2068059): n is a, c, g, or t
  misc_feature (2071944)..(2074388): n is a, c, g, or t
  misc_feature (2077276)..(2077285): n is a, c, g, or t
  misc_feature (2077776)..(2077785): n is a, c, g, or t
  misc_feature (2079822)..(2079963): n is a, c, g, or t
  misc_feature (2099994)..(2100087): n is a, c, g, or t
  misc_feature (2101621)..(2101621): n is a, c, g, or t
  misc_feature (2111187)..(2111214): n is a, c, g, or t
  misc_feature (2128572)..(2129569): n is a, c, g, or t
  misc_feature (2129891)..(2129900): n is a, c, g, or t
  misc_feature (2136592)..(2136865): n is a, c, g, or t
  misc_feature (2137405)..(2137414): n is a, c, g, or t
  misc_feature (2142352)..(2142967): n is a, c, g, or t
  misc_feature (2152571)..(2152611): n is a, c, g, or t
  misc_feature (2162035)..(2162044): n is a, c, g, or t
  misc_feature (2162420)..(2162429): n is a, c, g, or t
  misc_feature (2168678)..(2168687): n is a, c, g, or t
  misc_feature (2168965)..(2168974): n is a, c, g, or t
  misc_feature (2170448)..(2170528): n is a, c, g, or t
  misc_feature (2172418)..(2172450): n is a, c, g, or t
  misc_feature (2175858)..(2176004): n is a, c, g, or t
  misc_feature (2176822)..(2178287): n is a, c, g, or t
  misc_feature (2183532)..(2183533): n is a, c, g, or t
  misc_feature (2192827)..(2192836): n is a, c, g, or t
  misc_feature (2193136)..(2193193): n is a, c, g, or t
  misc_feature (2226691)..(2226701): n is a, c, g, or t
  misc_feature (2228677)..(2228844): n is a, c, g, or t
  misc_feature (2230490)..(2230490): n is a, c, g, or t
  misc_feature (2236754)..(2236902): n is a, c, g, or t
  misc_feature (2237173)..(2237182): n is a, c, g, or t
  misc_feature (2242420)..(2242420): n is a, c, g, or t
  misc_feature (2244111)..(2245118): n is a, c, g, or t
  misc_feature (2258246)..(2258284): n is a, c, g, or t
  misc_feature (2262189)..(2262198): n is a, c, g, or t
  misc_feature (2262472)..(2262481): n is a, c, g, or t
  misc_feature (2266513)..(2266701): n is a, c, g, or t
  misc_feature (2272669)..(2272678): n is a, c, g, or t
  misc_feature (2298575)..(2298993): n is a, c, g, or t
  misc_feature (2299347)..(2299359): n is a, c, g, or t
  misc_feature (2307329)..(2307440): n is a, c, g, or t
  misc_feature (2307847)..(2307856): n is a, c, g, or t
  misc_feature (2308269)..(2308278): n is a, c, g, or t
  misc_feature (2323624)..(2324477): n is a, c, g, or t
  misc_feature (2335007)..(2335040): n is a, c, g, or t
  misc_feature (2350282)..(2350318): n is a, c, g, or t
  misc_feature (2369126)..(2369670): n is a, c, g, or t
  misc_feature (2381400)..(2381716): n is a, c, g, or t
  misc_feature (2392901)..(2392930): n is a, c, g, or t
  misc_feature (2402695)..(2402695): n is a, c, g, or t
  misc_feature (2411490)..(2411775): n is a, c, g, or t
  misc_feature (2431281)..(2435739): n is a, c, g, or t
  misc_feature (2445436)..(2449828): n is a, c, g, or t
  misc_feature (2452416)..(2455423): n is a, c, g, or t
  misc_feature (2461739)..(2461937): n is a, c, g, or t
  misc_feature (2466912)..(2466921): n is a, c, g, or t
  misc_feature (2473868)..(2473868): n is a, c, g, or t
  misc_feature (2476490)..(2476490): n is a, c, g, or t
  misc_feature (2486351)..(2489785): n is a, c, g, or t
  misc_feature (2490307)..(2490316): n is a, c, g, or t
  misc_feature (2494031)..(2494157): n is a, c, g, or t
  misc_feature (2496343)..(2497092): n is a, c, g, or t
  misc_feature (2504781)..(2504819): n is a, c, g, or t
  misc_feature (2513626)..(2513666): n is a, c, g, or t
  misc_feature (2514241)..(2514535): n is a, c, g, or t
  misc_feature (2515079)..(2515133): n is a, c, g, or t

SEQ ID NO: 42 - protein, 991 aa, G. tomentella
MSGVEVVAPLVGEVGALGVGELHTKIASKIASSRNLDDNYKILLKDMEMLLAIKKDKEREVQRNNHTDTTNAYKLWTNRVSDAAEEVQKLKVKYEEKMLPWWRIHRRSRLSEEMEKKCNCVRELMKVECLRDFLVDKPPEPVLKELNVPQISGYPTLQGALENTLALLRNNKIKVIGVCGTKGVGKTTIMRNLNNNEEVAKLFEIVIFVKATTDDRKLQEKIANRLMLDIGTNKEHSDDVARRIHKELEKKKYLLILDEVEDAINLEQLGIPSGINGSKVVIATRFPLVYKLNRVQRVIKVMELTPEEAWKMFRDTVHAFNPKIDSLDIQPIAKLVCKRCSRLPLLIYNIANSFKLKESASSWSVGLEDLKPWPELQNQGLEELYSCLKFCYDELKDKKKQKCFLYTSLYPVDSKVYTDYLVECWAAQGLLGDINDKRSYRSARNCGIDILEHLANVSLLEKGESMIYVNMNHCMRQLALHISSKDPECSFYLQDGEESENLSNSKAWQQSRWVSMRQLLDLPTRQDCSMILTLLLRKNPKLTTIPQTFFENMSSLLLLDLYGSMITQLPSSLSKLTGLRGLFLNSCELLESLSSEIGSLQFLEVLDLRDTKVTFIPLQIGCLTNLRCLRIPFVASEDNAQNVHVISKLHRLEELTIQVISYEQWCNDAENVLQHVASLENVTHLQCCFPSSIILGKFLSRSKSWSCKQQNSFRFFVGCQNSRRPQILESFEYKITNYLRYCNGGQKDDSAIIEVLPITDAFELVCHKDIKKLSNFAGIVCLERIRGLLIKKCNKVLTIVSADTSGNTMNGVQIETRVILPNLEQLYLENLLNLKCVFRGPLHSGTFTKLHTLSLKNCPSLSEIFSNGAIQHFSELQNLKLEDCSKIEVLISKDIERERDVLPKLEMLLLVNLPNFNTICSTHTLAWSSLELLRIHNCPKLKTLPLDSDNAVNLKSIKGQQEWWDELEWTNNDEVYQRLQPIFAASVEYFS

SEQ ID NO: 43 - protein, 991 aa, G. tomentella; identical to SEQ ID NO: 42

SEQ ID NO: 44 - protein, 992 aa, G. tomentella
MSGLEVVAPLVGEVGAHGVGELHTTIASKIASSRNLDDNYNILLKEMEMLLAIKKDKEREVQRNNHKDTTNAYKLWTNRVSDAAEEVQKLKAKYEEKMLPWWRIQRRSHLSEEMEKKCNCVRELKKDECLRDFLVDKPPEPVLKELNVPQISGYPTLQGALENMLGLLKNNKIKVVGVCGTKGVGKTTIMQNLNNNEEVAKLFEIVIFVKATADDHKLQEKIVNRLMLDIETDKEHSDDVARRIHRELEKKKYLLILDEVEDAINLEQLGIPSDVNNGSKVVIATRLPRVYKLNKVQRVIKVMELSPEEAWKMFRDTVHAFNPNIDSLDIQPIAKLVCKRCSRLPLLIYNIANSFKLKESASSWSVGLEDLKPWPELENQGLEELYSCLKFCYDELKDKKKQKCFLYTSLYPANSKVYTDYLVECWAAQGLLGDINDKRSYQSARNCGIDILEHLANVSLLEKGESMIYVNMNHCMRQLALHISSKDPECSFYLQDGGESENLSNSRAWQKARWVSMRQLLDFPTSQDCSMILTLLLRKNPKLTTIPRTFFENMSSLLLLDLYNSMITQLPSSLSKLTCLRSLFLNNCELLESLSSEIGSLQFLEVLDIRDTKVTFIPLQIGCLTNLRCLRIPFIASEDNEAQNVHVISKLHRLEELTIQVISYEQWCNDAEFVLQHVASLENVAHLICCFPSSIILGEFLSRSKSWSCKQLNSFRFFVGCQNTRRPQILESFEYKITNYMRYCNGGQKDDSSIIEVLPKTDAFELVCHKDIKKLTNFAGIVCLERIRGLLITRCNKVLTIVSADTSSNTMNGIQIEKRVILPNLEQLYLENLLNLRCVFRGPLHSGTFSKLQILSLNNCPSLSDIFSNGAIQHFSELQNLKLEDCSKIEVLIGENIERERDVLPKLEILLLVNLPNFKTICSTHTLAWSSLELLRIHNCPNLKTLPLDSENAVNLKSIKGQQEWWDVLEWTNNEVYQRLQSIFAASNEYFS

SEQ ID NO: 45 - protein, 992 aa, G. tomentella; identical to SEQ ID NO: 44

SEQ ID NO: 46 - protein, 992 aa, G. tomentella
MSGLEVVAPLVGEVGAHGVGELHTTIASKIASSRNLDDNYNILLKEMEMLLAIKKDKEREVQRNNHKDTTNAYKLWTNRVSDAAEEVQKLKVKYEERMLPWWRIQRRSHLSEEMEKKCNCVRELKKDECLRDFLVDKPPEPVLKELNVPQISGYPTLQGALENMLGLLKNNKIKVVGVCGTKGVGKTTIMQNLNNNEEVAKLFEIVIFVKATADDHKLQEKIVNRLMLDIETDKEHSDDVARRIHKELEKKKYLLILDEVEDAINLEQLGIPSDVNNGSKVVIATRLPRVYKLNKVQRVIKVMELSPEEAWKMFRDTVHAFNPNIDSLDIQPIAKLVCKRCSRLPLLIYNIANSFKLKESASSWLVGLEDLKPWPELQNQGLEELYSCLKFCYDELKDKKKQKCFLYTSLYPANSKVYTDYLVECWAAQGLLGDINDKRSYQSARNCGIDILEHLANVSLLEKGESMIYVNMNHCMRQLALHISSKDPECSFYLQDGGESENLSNSRAWQKARWVSMRQLLDFPTSQDCSMILTLLLRKNPKLTTIPRTFFENMSSLLLLDLYNSMITQLPSSLSKLTCLRGLFLNSCELLESLSSEIGSLQFLEVLDIRDTKVTFIPLQIGCLTNLRCLRIPFIASEDNEAQNVHVISKLHRLEELTIQVISYEQWCDDAEIVLQHVASLENVTHLRCCFPSSIILGEFLSRSKSWSCKQLNSFRFFVGCQNTRRPQILESFEYKITNYLRYCNGGQKDDSAIIEVLPKTDAFELVCHKDIKKLTNFAGIVCLERIRGLLITRCNKVLTIVSADTSSNTMNGIQIETRVILPNLEQLYLENLLNLRCVFRGPLHSGTFSKLQTLSLKNCPSLSDIFSNGAIQHFSELQNLKLEDCSKIEVLIGENIERERDVLPKLEILLLVNLPSFKTICSTHALAWSSLELLRIHNCPNLKTLPLDSDNAVNLKSIKGQQEWWDELKWTNNEVYQRLQPIFAASNEYFS

SEQ ID NO: 47 - protein, 1686 aa, G. tomentella
MASISSVQSSSSAYDVFLSFHGEDTRNNNNNSTGFLFQALRRKGIVAFKGHTLPEKGEPELLHAIEGSRLFIVVLSKNYASSTRCLRELAHIFNCIETSPRRLLPIFYDVDPSDVREQTGWYEEAFWKHEQRFLVDKERMEEVRTWRKALTRVANLPGWYIPNKPQYTEIEEFVQYIITILGPNISTLQNEAEGTSSDKDEVLYNELSGLMRIRDFISLVLTYPGKLEDENILRSWISAFPEWKAQLLSTGDDTVMDKPWCVLTDKALGPMKGFMPMEIISKVESGERSIFSHNDVDAIPEAILQQSVDLAVNQLLQTLFSGDYCARYIRLLTRNLAEKGSVVDTIVSAVEDKHTMFGIDKDFLRALWINASTYETDAEVRVQEQIDINMMMEVDDMGSNGQLVIVVDADSNNKLDLQKLRFPTGIVVLITTEPSTQAEKDVDFRIACTMDLNIWTQDHLLPWKVFCSYVGSCISSSMVSSSMAIQKIAEEIVKECHGHLLAIVLVAKYLTYVQDFKQWELALDKLSSLNPSYDYQDSDRIGISRVMVNAFVNIIWEDIDDAQKLCLELSLPVHNIKNGVRDDILVSDWAKIISGYTQELGEYRRQLQHYINELQDRFVLLKYESGDVYLPVETYDIIKSLHTSKPSILRHGALGLTEPPYIGRWHSLVQIELMDNKICELPQSPDCPKLKVLLLQGNVDLMDIPDSFFNHMPLLQHLDLSYTSIRDLPPSVSKLIQLQKFYLRGCDLFMELPHQIGQLKNLKELDLDGTLITHLPIEIRELINLQSLSLCFDGTSRSTIIPPGLVSNLTQLNYLSINVDPEDERWNENVISVLREIFFGLWNLQRLSIYVPKADLLEFIPTQKSLNFRLVVGQHMRRLISRVPPELETKFKHCDYSIKFVNGVNVPNGVKMHLGRFKALYLDRHMTIKSLSDFDLRNLWGLEVCILAECNEMETIVSGSNSPDRPASLMLKFLSVFYMKNLRSVCEGSSPFFLCLKSIALHTCPMLTTIFTLDSLKKLSFLEEIIIEDCPKVTTLISHATPEQKPVFFLPKLRMISLLYLPELVNIFNGIHVGPFIEEMIFYYCPSLQSLSKSELSSKSLKIIKGESIWWEALKWNVAEWGDAGRPNYFDRIFSPINEEADMMNQLAALQETRLNEHHNTTYQGISSSTHSIAKSSLEIPVLSPLAPVSSVGRGSSNSEAQKRKVVTEPKILQDASKKIIKQVREQRTVQTEVWTEPEVWTEKISVNAEGYLNDGYSWRKYGQKSPLGAKFPRGYYKCAYGSVQGCPARKQGISSSTQSIAKSSLEIPVLSPSAPVSSVGRGSSNIEAQKRKVVTEPKIFQDASEKKGILGLGLKLSVPVSDQSNFAKFLDGVRIVSQNDVEAPPQIKPTDNQLTLADIDVIKVVGEGNGGVVQLVQHKWTRQFFVLKVIQMNIEESMRKQIAQELKITQQAQCPYVVVCYQSFYENGVISILLEYMDGGSLADLLKKVKTIPEDYLAAICKQVLKGLVYLHHEKHIIHRDLKPSNLLINHIGEVKITDFGVSTIMESTSGQANTFIGTYNYMSPERIIGSQRGYNYKSDIWSLGLILLECALGRFPYAPPDQSETWESIFELMETIVDKPPPSPPSEQFSTEFCSFISACLQKDPKDRLSAQELMAHPFVNMYDDLEVDLSAYFSNAGSPLATL

SEQ ID NO: 48 - protein, 992 aa, G. tomentella
MSGLEVVAPLVGEVGAHGVGELHTTIASKIASSRNLDDNYNILLKEMEMLLAIKKDKEREVQRNNHRDTTNAYKLWTNRVSDAAEEVQKLKAKYEEKMLPWWRIQRRSHLSEEMEKKCNCVRELKKDECLRDFLVDKPPEPVLKELNVPQISGYPTLQGALENMLGLLKNNKIKVVGVCGTKGVGKTTIMQNLNNNEEVAKLFEIVIFVKATADDHKLQEKIVDRLMLDIETDKEHSDDVARRIHKELEKKKYLLILDEVEDAINLEQLGIPSDVNNGSKVVIATRLPRVYKLNKVQRVIKVMELSPEEAWKMFRDTVHTFNPNIDSLDIQPIAKLVCKRCSRLPLLIYNIANSFKLKESASSWSVGLEDLKPWPELENQGLEELYSCLKFCYDELKDKKKQKCFLYTSLYPANSKVYTDYLVECWAAQGLLGDINDKRSYQSARNCGIDILEHLANVSLLEKGESMIYVNMNHCMRQLALHISSKDPECSFYLQDGGESENLSNSRAWQKARWVSMRQLLDFPTSQDCSMILTLLLRKNPKLTTIPRTFFENMSSLLLLDLYNSMITQLPSSLSKLTCLRSLFLNNCELLESLSSEIGSLQFLEVLDIRDTKVTFIPLQIGCLTNLRCLRIPFIASEDNEAQNVHVISKLHRLEELTIQVISYEQWCDDAEFVLQHVASLENVAHLICCFPSSIILGEFLSRSKSWSCKQLNSFKFFVGCQNTRRPQILESFEYKITNYLRYCNGGQKDDLAIIEVLPKTDAFELVCHKDIKKLTNFAGIVCLERIRGLLITRCNKVLTIVSADTSSNTMNGIQIETRVILPNLEQLYLENLLNLRRVFRGPLHSGTFSKLQILSLNNCPSLSDIFSNGAIQHFSELQNLKLEDCSKIEVLIGENIERERDVLPKLEILLLVNLPNFKTICSTHTLAWSSLELLRIHNCPNLKTLPLDSENAVNLKSIKGQQEWWDVLEWTNNEVYQRLQSIFAASNEYFS

SEQ ID NO: 49 - protein, 921 aa, G. tomentella
MIKCVTKGCAPLVGEVGAHGVGELHTTIASKIASSRNLDDNYNILLKEMEMLLAIKKDKEREVQRNNHKDTTNAYKLWTNRVSDAAEEVQKLKAKYEEKMLPWWRIQRRSHLSEEMEKSATDECLRDFLVDKPPEPVLKELNVPQISGYPTLQGALENMLGLLKNNKIKVVGVCGTKGVGKTTIMQNLNNNEEVAKLFEIVIFVKATADDHKLQEKIVDRLILDIETDKEHSDDVARRIHKELEKKKYLLILDEVEDAINLEQLGIPSDVNNGSKVVIATRLPRVYKLNKVQRVIKVMELSPEEAWKMFRDTVHAFILILIPLTFNLSPNLYAKESASSWSVGLEDLKPWPELENQGLEELYSCLKFCYDELKDKKSRNCWAAQGLLGDINDKRSYQSARNCGIDILEHLANVSLLEKGESMIYVNMNHCMRQLALHISSKDPECSFYLQDGGESENLSNSRAWQKARWHDFDIVAEKKSKTNYNTTNFFENMSSLLLLDLYNSMITQLPSSLSKLTCLRSLFLNNCELLESLSSEIGSLQFLEVLDIRDTKVTFIPLQIGCLINLRCLRIPFIASEDNEAQNVHVISKLHRLEELTIQVISYEQWCMMLNCLQHVASLENVAHLICCFPSSIILGEFLSRNFCGMPKHKAPQILESFEYKITNYLRYCNGGQKDDSAIIEVLPKTDAFELVCHQDIKKLTNFAGIVCLERIRGLLITRCNKVLSIVSADTSSNTMNGIQIETRVILPNLEQLYLENLLNLRCVFRGPLHSGTFSKLQILSLKNCPSLSDIFSNGAIQHFSELQNLKLEDCSKIEVLIGENIERERDVLPKLEILLLVNLPNFKTICSTHTLAWSSLELLRIHNCPNLKTLPLDSDNAVNLKSIKGQQEWWDELEWTNNEGISDCNPSLLPLMIGRLDGSL

SEQ ID NO: 50 - protein, 1317 aa, G. tomentella
MATAFLPLDPILQLPHSVRSPTPAIEKYLSFFTNKFTSTFAIPMASISSVQSSSSAYDVFLSFHGDDTRNNYTNFTGFLFQALRRKGIVAFKGHTLLEKGEPELLHAIQGSRLFIVVLSKNYASSTWCLRELAHIFNCIETSPRRLLPIFYDVDPSDVRKQTGWYEKAFSKHEERFLVDKERIEEMLTWRKALTRVANLSGWYIPIKPQYTEIEEFVQYIITLLGPKFSTLQNEAEGTSSDKDEVLYNDELSDLMRIRDFISLVLTYPVKLEDEYILRSWISAFPEWKAQLLSTGDDTVMDKPWCVLTEKALGSMKGFMPMEIISKVESGERSIISHNDVDAIPEAILQQSVDLAVNQLLQTLFSGDYCARYIRLLTRNLAEKGSVVDTIASAVEDKHTMFGIDKDFLRALWINASTYETDAEVRVQEEIDVNMMMEVDDMGSNGQLVIVVDADSNNKLDLQKLRFPTGIVVLITTEPSTQAEKDVDFRIACTMDLNIWTQDHLLPWKLCGSCISSSMVRSSMAIQKIAVEIVKECHGHLLAIVLVAKYLTYVQDFKQWELALDKLSSLNPSYDYQDSDRIGISRVMVNAFVNIIWEDIGDAQKLCLELSLPVHNIKNGVRDDILVSDWAKTILGYTQELGEYRRQLQHYINELQDRFVLLKYESGDVYLPVETYDIIQSLHTSKPSILRHGALGLTEPPYIGRWHSLIQIELMDNKICELPQSPDCPKLKVLLLQGNVDLMDIPDSFFNHMPLLQHLDLSYTSIRDLPPSVSKLIQLQKFYLRGCDLFMELPHQIGQLKNLKELDLDGTLITHLPIEIRELINLQSLSLCFDGTSKSTIIPPGLISNLTQLKYLSINVDPEDERWNVNVISVLAEICYGLCNLQRLSIYVPEADFLKVIPAQKSLSFRLVVGQHMRRLISRVPPELETKFKHCDYSIKFVNGVNVPNGVKMHLGRSKALYLDRHMTIKSLSDFDLRNLWELEVCILAECNEMETIVSGSNSPDRPASLMLKFLSVFYMKNLRSVCEGSSPFFLCLKSIALHTCPMLTTIFTLDSVKNLSFLEEIIVEDCPKVTTLISHATPEQYPVFFLPKLRMISLLYLPELVNIFNGMHVGPFIEEMIFYYCPKLQSLSKSELSSKSLKIIKGESIWWEELKWNVAEWGDAGRPNYFERIFSPINEEADMMNQLAALQETQLNEYHNTTYQGISSSTHSIAKSSLEIPVLSPLAPVSSVGRFSSNSEAQKRKVVTEPKILQDASKKVRKLRTVQTEVWREKISVNAEGCFDDGRSWRKYGQKISLELSFQEDITNAHMDLYKGA
